(19) United States
(12) Patent Application Publication
(10) Pub. No.: US 2009/0060916 A1
(43) Pub. Date: Mar. 5, 2009

(54) Ligands that bind IL-4 and/or IL-13

(76) Inventors: Inusha De Silva, Cambridge (GB); Caroline J. Dimech, Cambridge (GB); Malgorzaa Pupecka, Cambridge (GB); Rudolf M. T. de Wildt, Cambridge (GB)

Correspondence Address: MCDERMOTT WILL & EMERY LLP, 28 STATE STREET, BOSTON, MA, 02109-1775, US

(21) Appl. No.: 12/152,903

(22) Filed: May 15, 2008

Related U.S. Application Data
(63) Continuation-in-part of application No. PCT/GB2007/000228, filed on Jan. 24, 2007.
(60) Provisional application No. 60/761,708, filed on Jan. 24, 2006.

(51) Int. Cl. C07K 16/24; A61K 39/395; C12N 15/13; C12N 15/85; C12N 5/10; C12P 21/08; C12N 5/06

(52) U.S. Cl. 424/139.1; 530/387.9; 536/23.53; 435/320.1; 435/331; 435/69.6; 435/375

(57) ABSTRACT

Disclosed are ligands that have binding specificity for interleukin-4 (IL-4), for interleukin-13 (IL-13), or for IL-4 and IL-13. Also disclosed are methods of using these ligands. In particular, the use of these ligands for treating allergic asthma is described.

### RELATED APPLICATION

[0001] This application is a Continuation-in-part of PCT/GB2007/000228, filed Jan. 24, 2007, which claims the benefit of U.S. Provisional Application No. 60/761,708, filed on Jan. 24, 2006. The entire teachings of the above applications are incorporated herein by reference.

### BACKGROUND OF THE INVENTION

[0002] Interleukin-4 (IL-4) is a pleiotropic cytokine that has a broad spectrum of biological effects on B cells, T cells, and many non-lymphoid cells including monocytes, endothelial cells and fibroblasts. For example, IL-4 stimulates the proliferation of several IL-2- and IL-3-dependent cell lines, induces the expression of class II major histocompatability complex molecules on resting B cells, and enhances the secretion of IgG4 and IgE by human B cells. IL-4 is associated with a Th2-type immune response, and is produced by and promotes differentiation of Th2 cells. IL-4 has been implicated in a number of disorders, such as allergy and asthma.

[0003] Interleukin-13 (IL-13) is a pleiotropic cytokine that induces immunoglobulin isotype switching to IgG4 and IgE, CD23 up regulation, VCAM-1 expression, and directly activates eosinphils and mast cells, for example. IL-13 is mainly produced by Th2 cells and inhibits the production of inflammatory cytokines (IL-1, IL-6, TNF, IL-8) by LPS-stimulated monocytes. IL-13 is closely related to IL-4 with which it shares 20-25% sequence similarity at the amino acid level. (Minty et. al., Nature, 363(6417):248-50 (1993)). Although many activities of IL-13 are similar to those of IL-4, IL-13 does not have growth promoting effects on activated T cells or T cells clones as IL-4 does. (Zurawski et al., EMBO J. 12:2663 (1993)).

[0004] The cell surface receptors and receptor complexes bind IL-4 and/or IL-13 with different affinities. The principle components of receptors and receptor complexes that bind IL-4 and/or IL-13 are IL-4Rα, IL-13Rα1 and IL-13Rα2. These chains are expressed on the surface of cells as monomers or heterodimers of IL-4Rα/IL-13Rα1 or IL-4Rα/IL-13Rα2. IL-4rα monomer binds IL-4, but not IL-13. IL-13Rα1 and IL-13Rα2 monomers bind IL-13, but do not bind IL-4. IL-4Rα/IL-13Rα1 and IL-4Rα/IL-13Rα2 heterodimers bind both IL-4 and IL-13.

[0005] Th2-type immune responses promote antibody production and humoral immunity, and are elaborated to fight off extracellular pathogens. Th2 cells are mediators of Ig production (humoral immunity) and produce IL-4, IL-5, IL-6, IL-9, IL-10 and IL-13 (Tanaka, et. al., Cytokine Regulation of Humoral Immunity, 251-272, Snapper, ed., John Wiley and Sons, New York (1996)). Th2-type immune responses are characterized by the generation of certain cytokines (e.g., IL-4, IL-13) and specific types of antibodies (IgE, IgG4) and are typical of allergic reactions, which may result in watery eyes and asthmatic symptoms, such as airway inflammation and contraction of airway muscle cells in the lungs.

[0006] Both IL-4 and IL-13 are therapeutically important proteins based on their biological functions. IL-4 has been shown to be able to inhibit autoimmune disease and IL-4 and IL-13 have both shown the potential to enhance anti-tumor immune responses. Since both cytokines are involved in the pathogenesis of allergic diseases, inhibitors of these cytokines could provide therapeutic benefits. However, inhibiting only IL-4 or IL-13 using conventional agents may not provide desired therapeutic results because many of the activities and functions of these cytokines are similar. Accordingly, a need exists for improved agents that inhibit IL-4, inhibit IL-13, and single agents that inhibit both IL-4 and IL-13

### SUMMARY OF THE INVENTION

[0007] The invention relates to ligands that have binding specificity for IL-4 (e.g., human IL-4), ligands that have binding specificity for IL-13 (e.g., human IL-13), and to ligands that have binding specificity for IL-4 and IL-13 (e.g., human IL-4 and human IL-13). For example, the ligand can comprise a polypeptide domain having a binding site with binding specificity for IL-4, a polypeptide domain having a binding site with binding specificity for IL-13, or comprise a polypeptide domain having a binding site with binding specificity for IL-4 and a polypeptide domain having a binding site with binding specificity for IL-13.

[0008] In one aspect, the invention relates to a ligand that has binding specificity for IL-4 and for IL-13. Such ligands comprise a protein moiety that has a binding site with binding specificity for IL-4 and a protein moiety that has a binding site with binding specificity for IL-13. The protein moiety that has a binding site with binding specificity for IL-4 and the protein moiety that has a binding site with binding specificity for IL-13 can be any suitable binding moiety. The protein moieties can be a peptide moiety, polypeptide moiety or protein moiety. For example, the protein moieties can be provided by an antibody fragment that has a binding site with binding specificity for IL-4 or IL-13, such as an immunoglobulin single variable domain that has binding specificity for IL-4 or IL-13.

[0009] The ligand can comprise a protein moiety that has a binding site with binding specificity for IL-13 (e.g., an immunoglobulin single variable domain) that competes for binding to IL-13 with an anti-IL-13 domain antibody (dAb) selected from the group consisting of DOM10-53-474 (SEQ ID NO:2369), DOM10-275-78 (SEQ ID NO:2456), DOM10-275-94 (SEQ ID NO:2457), DOM10-275-99 (SEQ ID NO:2458), DOM10-275-100 (SEQ ID NO:2459) and DOM10-275-101 (SEQ ID NO:2460). For example, the binding of the protein moiety that has a binding site with binding specificity for IL-13 to IL-13 can be inhibited by a dAb selected from the group consisting of DOM10-53-474 (SEQ ID NO:2369), DOM10-275-78 (SEQ ID NO:2456), DOM10-275-94 (SEQ ID NO:2457), DOM10-275-99 (SEQ ID NO:2458), DOM10-275-100 (SEQ ID NO:2459) and DOM10-275-101 (SEQ ID NO:2460). The protein moiety that has a binding site with binding specificity for IL-13 can have the epitopic specificity of a dAb selected from the group consisting of DOM10-53-474 (SEQ ID NO:2369), DOM10-275-78 (SEQ ID NO:2456), DOM10-275-94 (SEQ ID NO:2457), DOM10-275-99 (SEQ ID NO:2458), DOM10-275-100 (SEQ ID NO:2459) and DOM10-275-101 (SEQ ID NO:2460).

[0010] In another embodiment, the ligand can comprise a protein moiety that has a binding site with binding specificity for IL-13 (e.g., an immunoglobulin single variable domain) that competes for binding to IL-13 with an anti-IL-13 domain antibody (dAb) selected from the group consisting of DOM10-275-78 (SEQ ID NO:2456), DOM10-275-94 (SEQ ID NO:2457), DOM10-275-99 (SEQ ID NO:2458), DOM10-275-100 (SEQ ID NO:2459) and DOM10-275-101 (SEQ ID NO:2460). For example, the binding of the protein moiety that has a binding site with binding specificity for IL-13 to IL-13 can be inhibited by a dAb selected from the group consisting of DOM10-275-78 (SEQ ID NO:2456), DOM10-275-94 (SEQ ID NO:2457), DOM10-275-99 (SEQ ID NO:2458), DOM10-275-100 (SEQ ID NO:2459) and DOM10-275-101 (SEQ ID NO:2460). The protein moiety that has a binding site with binding specificity for IL-13 can have the epitopic specificity of a dAb selected from the group consisting of DOM10-275-78 (SEQ ID NO:2456), DOM10-275-94 (SEQ ID NO:2457), DOM10-275-99 (SEQ ID NO:2458), DOM10-275-100 (SEQ ID NO:2459) and DOM10-275-101 (SEQ ID NO:2460).

[0011] The ligand that has binding specificity for IL-4 and IL-13 can inhibit binding of IL-4 to IL-4R, inhibit the activity of IL-4, and/or inhibit the activity of IL-4 without substantially inhibiting binding of IL-4 to IL-4R.

[0012] Preferably, the ligand (e.g., immunoglobulin single variable domain) that binds IL-4 inhibits binding of IL-4 to an IL-4 receptor (e.g., IL-4Rα) with an inhibitory concentration 50 (IC50) that is ≦10 μM, ≦1 μM, ≦100 nM, ≦10 nM, ≦1 nM, ≦500 pM, ≦300 pM, ≦100 pM, or ≦10 pM. The IC50 is preferably determined using an in vitro receptor binding assay, such as the assay described herein.

[0013] It is also preferred that the ligand (e.g., immunoglobulin single variable domain) that binds an IL-4 receptor inhibits IL-4 induced functions in a suitable in vitro assay with a neutralizing dose 50 (ND50) that is ≦10 μM, ≦1 μM, ≦100 nM, ≦10 nM, ≦1 nM, ≦500 pM, ≦300 pM, ≦100 pM, or ≦10 pM. For example, the ligand that binds an IL-4 receptor can inhibit IL-4 induced proliferation of TF-1 cells (ATCC Accession No. CRL-2003) in an in vitro assay, such as the assay described herein.

[0014] It is also preferred that the ligand (e.g., immunoglobulin single variable domain) that binds an IL-4 receptor inhibits house dust mite (HDM) induced proliferation of peripheral blood mononuclear cells (PBMC) by at least about 20%, at least about 30%, at least about 40%, at least about 50%, at least about 60%, at least about 70%, at least about 80%, or at least about 90% in a suitable in vitro assay, such as the assay described herein where 4×10⁶ cells/ml are stimulated with 20-50 ug/ml HDM and 100 nM anti-IL-4 dAbs are added.

[0015] A ligand (e.g., immunoglobulin single variable domain) that does not substantially inhibit binding of IL-4 to an IL-4 receptor (e.g., IL-4Rα) does not significantly inhibit binding of IL-4 to an IL-4 receptor in the receptor binding assay described herein. For example, such a ligand might inhibit binding of IL-4 to an IL-4 receptor in the receptor binding assay described herein with an IC50 of about 1 mM or higher or inhibits binding by no more than about 20%, no more than about 15%, no more than about 10%, or no more than about 5%.

[0016] The ligand that has binding specificity for IL-4 and IL-13 can inhibit binding of IL-13 to IL-13Rα1 and/or IL-13Rα2, inhibit the activity of IL-13, and/or inhibit the activity of IL-13 without substantially inhibiting binding of IL-13 to IL-13 Rα1 and/or IL-13Rα2.

[0017] Preferably, the ligand (e.g., immunoglobulin single variable domain) that binds IL-13 inhibits binding of IL-13 to an IL-13 receptor (e.g., IL-13Rα1, IL-13Rα2) with an inhibitory concentration 50 (IC50) that is ≦10 μM, ≦1 μM, ≦100 nM, ≦10 nM, ≦nM, ≦500 pM, ≦300 pM, ≦100 pM, or ≦10 pM. The IC50 is preferably determined using an in vitro receptor binding assay, such as the assay described herein.

[0018] It is also preferred that the ligand (e.g., immunoglobulin single variable domain) that binds an IL-13 receptor inhibits IL-13 induced functions in a suitable in vitro assay with a neutralizing dose 50 (ND50) that is ≦10 μM, ≦1 μM, ≦100 nM, ≦10 nM, ≦nM, ≦500 pM, ≦300 pM, ≦100 pM, ≦10 pM, ≦1 pM≦500 fM, ≦300 fM, ≦100 fM, ≦10 fM. For example, the ligand that binds an IL-13 receptor can inhibit IL-13 induced proliferation of TF-1 cells (ATCC Accession No. CRL-2003) in an in vitro assay, such as the assay described herein wherein TF-1 cells were mixed with 5 ng/ml final concentration of IL-13.

[0019] It is also preferred that the ligand that binds an IL-13 receptor inhibits IL-13 induced B cell proliferation by at least about 50%, at least about 60%, at least about 70%, at least about 80%, or at least about 90% in an in vitro assay, such as the assay described herein where 1×10⁵ B cells were incubated with 10 or 100 nM anti-IL-13 dAbs.

[0020] A ligand (e.g., immunoglobulin single variable domain) that does not substantially inhibit binding of IL-13 to an IL-13 receptor (e.g., IL-13Rα1, IL-13Rα2) does not significantly inhibit binding of IL-13 to an IL-13 receptor in the receptor binding assay or sandwich ELISA described herein. For example, such a ligand might inhibit binding of IL-13 to an IL-13 receptor in the receptor binding assay described herein with an IC50 of about 1 mM or higher or inhibit binding by no more than about 20%, no more than about 15%, no more than about 10%, or no more than about 5%.

[0021] In more particular embodiments, the ligand that has binding specificity for IL-4 and for IL-13 comprises an immunoglobulin single variable domain with binding specificity for IL-4 and an immunoglobulin single variable domain with binding specificity for IL-13, wherein an immunoglobulin single variable domain with binding specificity for IL-4 competes for binding to IL-4 with an anti-IL-4 domain antibody (dAb) selected from the group of anti-IL-4 dAbs disclosed herein.

[0022] In more particular embodiments, the ligand that has binding specificity for IL-4 and for IL-13 comprises an immunoglobulin single variable domain with binding specificity for IL-4 and an immunoglobulin single variable domain with binding specificity for IL-13, wherein an immunoglobulin single variable domain with binding specificity for IL-13 competes for binding to IL-13 with an anti-IL-13 domain antibody (dAb) selected from the group consisting of the anti-IL-13 dabs disclosed herein.

[0023] The ligand that has binding specificity for IL-4 and IL-13 can contain a protein binding moiety (e.g., immunoglobulin single variable domain) with binding specificity for IL-4 that binds IL-4 with an affinity (KD) that is between about 100 nM and about 1 pM, as determined by surface plasmon resonance.

[0024] The ligand that has binding specificity for IL-4 and IL-13 can contain a protein binding moiety (e.g., immunoglobulin single variable domain) with binding specificity for IL-13 that binds IL-13 with an affinity (KD) that is between about 100 nM and about 1 pM, as determined by surface plasmon resonance.

[0025] The ligand that has binding specificity for IL-4 and IL-13 can bind IL-4 with an affinity (KD) that is between about 100 nM and about 1 pM, as determined by surface plasmon resonance.

[0026] The ligand that has binding specificity for IL-4 and IL-13 can bind IL-13 with an affinity (KD) that is between about 100 nM and about 1 pM, as determined by surface plasmon resonance.

[0027] The ligand that has binding specificity for IL-4 and IL-13 can comprise an immunoglobulin single variable domain with binding specificity for IL-4 and an immunoglobulin single variable domain with binding specificity for IL-13, wherein the immunoglobulin single variable domains are selected from the group consisting of a human V_{H} and a human V_{L}.

[0028] In some embodiments, the ligand that has binding specificity for IL-4 and IL-13 can be an IgG-like format comprising two immunoglobulin single variable domains with binding specificity for IL-4, and two immunoglobulin single variable domains with binding specificity for IL-13.

[0029] In some embodiments, the ligand that has binding specificity for IL-4 and for IL-13 can comprise an antibody Fc region.

[0030] In some embodiments, the ligand that has binding specificity for IL-4 and IL-13 can comprise an IgG constant region.

[0031] The invention also relates to a ligand that has binding specificity for IL-13 comprising an immunoglobulin single variable domain with binding specificity for IL-13, wherein the immunoglobulin single variable domain with binding specificity for IL-13 competes for binding to IL-13 with an anti-IL-13 domain antibody (dAb) selected from the group consisting of the anti-IL-13 dAbs disclosed herein. For example, the immunoglobulin single variable domain with binding specificity for IL-13 can comprise an amino acid sequence that has at least about 70%, at least about 75%, at least about 80% or at least about 85% amino acid sequence identity with the amino acid sequence of a dAb selected from the group consisting of the anti-IL-13 dAbs disclosed herein. In other examples, the binding of the immunoglobulin single variable domain with binding specificity for IL-13 to IL-13 is inhibited by a dAb selected from the group consisting of DOM10-53-474 (SEQ ID NO:2369), DOM10-275-78 (SEQ ID NO:2456), DOM10-275-94 (SEQ ID NO:2457), DOM10-275-99 (SEQ ID NO:2458), DOM10-275-100 (SEQ ID NO:2459) and DOM10-275-101 (SEQ ID NO:2460). In other examples, the immunoglobulin single variable domain with binding specificity for IL-13 has the epitopic specificity of a dAb selected from the group consisting of DOM10-53-474 (SEQ ID NO:2369), DOM10-275-78 (SEQ ID NO:2456), DOM10-275-94 (SEQ ID NO:2457), DOM10-275-99 (SEQ ID NO:2458), DOM10-275-100 (SEQ ID NO:2459) and DOM10-275-101 (SEQ ID NO:2460).

[0032] The ligand that has binding specificity for IL-13 can inhibit binding of IL-13 to IL-13Rα1 and/or IL-13Rα2, inhibit the activity of IL-13, and/or inhibit the activity of IL-13 without substantially inhibiting binding of IL-13Rα1 and/or IL-13Rα2 to IL-13.

[0033] Preferably, the ligand (e.g., immunoglobulin single variable domain) that binds IL-13 inhibits binding of IL-13 to an IL-13 receptor (e.g., IL-13Rα1, IL-13Rα2) with an inhibitory concentration 50 (IC50) that is ≦10 μM, ≦1 μM, ≦100 nM, ≦10 nM, ≦1 nM, ≦500 pM, ≦300 pM, ≦100 pM, or ≦10 pM. The IC50 is preferably determined using an in vitro receptor binding assay, such as the assay described herein.

[0034] It is also preferred that the ligand (e.g., immunoglobulin single variable domain) that binds an IL-13 receptor inhibits IL-13 induced functions in a suitable in vitro assay with a neutralizing dose 50 (ND50) that is ≦10 μM, ≦1 μM, ≦100 nM, ≦10 nM, ≦1 nM, ≦500 pM, ≦300 pM, ≦100 pM, ≦10 pM, ≦1 pM≦500 fM, ≦300 fM, ≦100 fM, ≦10 fM. For example, the ligand that binds an IL-13 receptor can inhibit IL-13 induced proliferation of TF-1 cells (ATCC Accession No. CRL-2003) in an in vitro assay, such as the assay described herein wherein TF-1 cells were mixed with 5 ng/ml final concentration of IL-13.

[0035] It is also preferred that the ligand that binds an IL-13 receptor inhibits IL-13 induced B cell proliferation by at least at least about 70%, at least about 80%, or at least about 90% in an in vitro assay, such as the assay described herein where 1×10⁵ B cells were incubated with 10 or 100 nM anti-IL-13 dAbs.

[0036] A ligand (e.g., immunoglobulin single variable domain) that does not substantially inhibit binding of IL-13 to an IL-13 receptor (e.g., IL-13Rα1, IL-13Rα2) does not significantly inhibit binding of IL-13 to an IL-13 receptor in the receptor binding assay or sandwich ELISA described herein. For example, such a ligand might inhibit binding of IL-13 to an IL-13 receptor in the receptor binding assay described herein with an IC50 of about 1 mM or higher or inhibit binding by no more than about 20%, no more than about 15%, no more than about 10%, or no more than about 5%.

[0037] The ligand that has binding specificity for IL-13 can contain an immunoglobulin single variable domain with binding specificity for IL-13 that binds IL-13 with an affinity (KD) that is between about 100 nM and about 1 pM, as determined by surface plasmon resonance.

[0038] The ligand that has binding specificity for IL-13 can bind IL-13 with an affinity (KD) that is between about 100 nM and about 1 pM, as determined by surface plasmon resonance.

[0039] The ligand that has binding specificity for IL-13 can comprise an immunoglobulin single variable domain with binding specificity for IL-13 that is selected from the group consisting of a human V_{H} and a human V_{L}.

[0040] In some embodiments, the ligand that has binding specificity for IL-13 is an IgG-like format comprising at least two immunoglobulin single variable domains with binding specificity for IL-13.

[0041] In some embodiments, the ligand that has binding specificity for IL-13 comprises an antibody Fc region.

[0042] In some embodiments, the ligand that has binding specificity for IL-13 comprises an IgG constant region.

[0043] The invention also relates to a ligand (e.g., a fusion protein) that has binding specificity for IL-4 and IL-13, comprising an immunoglobulin single variable domain with binding specificity for IL-4, wherein an immunoglobulin single variable domain with binding specificity for IL-4 competes for binding to IL-4 with an anti-IL-4 domain antibody (dAb) selected from the group consisting of the anti-IL-4 dAbs disclosed herein and comprising an immunoglobulin single variable domain with binding specificity for IL-13, wherein an immunoglobulin single variable domain with binding specificity for IL-13 competes for binding to IL-13 with an anti-IL-13 domain antibody (dAb) selected from the group consisting of the anti-IL-13 dAbs disclosed herein.

[0044] For example, the ligand (e.g., fusion protein) comprising an immunoglobulin single variable domain with binding specificity for IL-4 can comprise an amino acid sequence that has at least 85% amino acid sequence identity with the amino acid sequence of a dAb selected from the group consisting of the anti-IL-4 dAbs disclosed herein.

[0045] In another example, the ligand (e.g., fusion protein) comprising an immunoglobulin single variable domain with binding specificity for IL-13 can comprise an amino acid sequence that has at least 85% amino acid sequence identity with the amino acid sequence of a dAb selected from the group consisting of the anti-IL-13 dAbs disclosed herein.

[0046] In some embodiments, the ligand (e.g., fusion protein) comprising an immunoglobulin single variable domain with binding specificity for IL-4 and an immunoglobulin single variable domain with binding specificity for IL-3 further comprises a linker moiety.

[0047] In some embodiments, the ligand comprises a protein moiety that has a binding site that binds IL-13, wherein said protein moiety comprises an amino acid sequence that is the same as the amino acid sequence of CDR3 of an anti-IL-13 dAb disclosed herein.

[0048] In other embodiments, the ligand comprises a protein moiety that has a binding site that binds IL-13, wherein said protein moiety comprises an amino acid sequence that is the same as the amino acid sequence of CDR3 of an anti-IL-13 dAb disclosed herein and has an amino acid sequence that is the same as the amino acid sequence of CDR1 and/or CDR2 of an anti-IL-13 dAb disclosed herein.

[0049] In other embodiments, the ligand comprises an immunoglobulin single variable domain that binds IL-13, wherein the amino acid sequence of the immunoglobulin single variable domain that binds IL-13 differs from the amino acid sequence of an anti-IL-13 dAb disclosed herein at no more than 25 amino acid positions and has a CDR1 sequence that has at least 50% identity to the CDR1 sequences of the anti-IL-13 dAbs disclosed herein.

[0050] In other embodiments, the ligand comprises an immunoglobulin single variable domain that binds IL-13, wherein the amino acid sequence of the immunoglobulin single variable domain that binds IL-13 differs from the amino acid sequence of an anti-IL-13 dAb disclosed herein at no more than 25 amino acid positions and has a CDR2 sequence that has at least 50% identity to the CDR2 sequences of the anti-IL-13 dAbs disclosed herein.

[0051] In other embodiments, the ligand comprises an immunoglobulin single variable domain that binds IL-13, wherein the amino acid sequence of the immunoglobulin single variable domain that binds IL-13 differs from the amino acid sequence of an anti-IL-13 dAb disclosed herein at no more than 25 amino acid positions and has a CDR3 sequence that has at least 50% identity to the CDR3 sequences of the anti-IL-13 dAbs disclosed herein.

[0052] In other embodiments, the ligand comprises an immunoglobulin single variable domain that binds IL-13, wherein the amino acid sequence of the immunoglobulin single variable domain that binds IL-13 differs from the amino acid sequence of an anti-IL-13 dAb disclosed herein at no more than 25 amino acid positions and has a CDR1 sequence and a CDR2 sequence that has at least 50% identity to the CDR1 and CDR2 sequences, respectively, of the anti-IL-13 dAbs disclosed herein.

[0053] In other embodiments, the ligand comprises an immunoglobulin single variable domain that binds IL-13, wherein the amino acid sequence of the immunoglobulin single variable domain that binds IL-13 differs from the amino acid sequence of an anti-IL-13 dAb disclosed herein at no more than 25 amino acid positions and has a CDR2 sequence and a CDR3 sequence that has at least 50% identity to the CDR2 and CDR3 sequences, respectively, of the anti-IL-13 dAbs disclosed herein.

[0054] In other embodiments, the ligand comprises an immunoglobulin single variable domain that binds IL-13, wherein the amino acid sequence of the immunoglobulin single variable domain that binds IL-13 differs from the amino acid sequence of an anti-IL-13 dAb disclosed herein at no more than 25 amino acid positions and has a CDR1 sequence and a CDR3 sequence that has at least 50% identity to the CDR1 and CDR3 sequences, respectively, of the anti-IL-13 dAbs disclosed herein.

[0055] In other embodiments, the ligand comprises an immunoglobulin single variable domain that binds IL-13, wherein the amino acid sequence of the immunoglobulin single variable domain that binds IL-13 differs from the amino acid sequence of an anti-IL-13 dAb disclosed herein at no more than 25 amino acid positions and has a CDR1 sequence, CDR2 sequence and a CDR3 sequence that has at least 50% identity to the CDR1, CDR2 and CDR3 sequences, respectively, of the anti-IL-13 dAbs disclosed herein.

[0056] In another embodiment, the invention is a ligand comprising an immunoglobulin single variable domain that binds IL-13, wherein the immunoglobulin single variable domain comprises a CDR2 sequence that has at least 50% identity to the CDR2 sequence of an anti-IL-13 dAb disclosed herein.

[0057] In another embodiment, the invention is a ligand comprising an immunoglobulin single variable domain that binds IL-13, wherein the immunoglobulin single variable domain comprises a CDR3 sequence that has at least 50% identity to the CDR3 sequence of an anti-IL-13 dAb disclosed herein.

[0058] In another embodiment, the invention is a ligand comprising an immunoglobulin single variable domain that binds IL-13, wherein the immunoglobulin single variable domain comprises a CDR1 and a CDR2 sequence that has at least 50% identity to the CDR1 and CDR2 sequences, respectively, of an anti-IL-13 dAb disclosed herein.

[0059] In another embodiment, the invention is a ligand comprising an immunoglobulin single variable domain that binds IL-13, wherein the immunoglobulin single variable domain comprises a CDR2 and a CDR3 sequence that has at least 50% identity to the CDR2 and CDR3 sequences, respectively, of an anti-IL-13 dAb disclosed herein.

[0060] In another embodiment, the invention is a ligand comprising an immunoglobulin single variable domain that binds IL-13, wherein the immunoglobulin single variable domain comprises a CDR1 and a CDR3 sequence that has at least 50% identity to the CDR1 and CDR3 sequences, respectively, of an anti-IL-13 dAb disclosed herein.

[0061] In another embodiment, the invention is a ligand comprising an immunoglobulin single variable domain that binds IL-13, wherein the immunoglobulin single variable domain comprises a CDR1, CDR2, and a CDR3 sequence that has at least 50% identity to the CDR1, CDR2, and CDR3 sequences, respectively, of an anti-IL-13 dAb disclosed herein.

[0062] In other embodiments, any of the ligands described herein further comprises a half-life extending moiety, such as a polyalkylene glycol moiety, serum albumin or a fragment thereof, transferring receptor or a transferring-binding portion thereof, or a moiety comprising a binding site for a polypeptide that enhance half-life in vivo. In some embodiments, the half-life extending moiety is a moiety comprising a binding site for a polypeptide that enhances half-life in vivo selected from the group consisting of an affibody, a SpA domain, an LDL receptor class A domain, an EGF domain, and an avimer.

[0063] In other embodiments, the half-life extending moiety is a polyethylene glycol moiety.

[0064] In other embodiments, the half-life extending moiety is an antibody or antibody fragment (e.g., an immunoglobulin single variable domain) comprising a binding site for serum albumin or neonatal Fc receptor.

[0065] The invention also relates to a ligand of the invention for use in therapy or diagnosis, and to the use of a ligand of the invention for the manufacture of a medicament for treatment, prevention or suppression of a disease described herein (e.g., allergic disease, Th2-mediated disease, asthma, cancer).

[0066] The invention also relates to a ligand of the invention for use in treating, suppressing or preventing a Th2-type immune response.

[0067] The invention also relates to therapeutic methods that comprise administering a therapeutically effective amount of a ligand of the invention to a subject in need thereof. In one embodiment, the invention relates to a method for inhibiting a Th2-type immune response comprising administering to a subject in need thereof a therapeutically effective amount of a ligand of the invention.

[0068] In other embodiments, the invention relates to a method for treating asthma comprising administering to a subject in need thereof a therapeutically effective amount of a ligand of the invention.

[0069] In other embodiments, the invention relates to a method for treating cancer comprising administering to a subject in need thereof a therapeutically effective amount of a ligand of the invention.

[0070] The invention also relates to the use of any of the ligands of the invention for the manufacture of a medicament for simultaneous administration of an anti-IL-4 treatment and an anti-IL-13 treatment. In other embodiments, the invention relates to a method of administering to a subject anti-IL-4 treatment and anti-IL-13 treatment, comprising simultaneous administration of an anti-IL-4 treatment and an anti-IL-13 treatment by administering to the subject a therapeutically effective amount of a ligand that has binding specificity for IL-4 and IL-13.

[0071] The invention also relates to a composition (e.g., pharmaceutical composition) comprising a ligand of the invention and a physiologically acceptable carrier. In some embodiments, the composition comprises a vehicle for intravenous, intramuscular, intraperitoneal, intraarterial, intrathecal, intraarticular, subcutaneous administration, pulmonary, intranasal, vaginal, or rectal administration.

[0072] The invention also relates to a drug delivery device comprising the composition (e.g., pharmaceutical composition) of the invention. In some embodiments, the drug delivery device comprises a plurality of therapeutically effective doses of ligand.

[0073] In other embodiments, the drug delivery device is selected from the group consisting of parenteral delivery device, intravenous delivery device, intramuscular delivery device, intraperitoneal delivery device, transdermal delivery device, pulmonary delivery device, intraarterial delivery device, intrathecal delivery device, intraarticular delivery device, subcutaneous delivery device, intranasal delivery device, vaginal delivery device, rectal delivery device, syringe, a transdermal delivery device, a capsule, a tablet, a nebulizer, an inhaler, an atomizer, an aerosolizer, a mister, a dry powder inhaler, a metered dose inhaler, a metered dose sprayer, a metered dose mister, a metered dose atomizer, and a catheter.

[0074] The invention also relates to an isolated or recombinant nucleic acid encoding any of the ligands of the invention. In other embodiments, the invention relates to a vector comprising the recombinant nucleic acid of the invention.

[0075] The invention also relates to a host cell comprising the recombinant nucleic acid of the invention or the vector of the invention.

[0076] The invention also relates to a method for producing a ligand, comprising maintaining a host cell of the invention under conditions suitable for expression of a nucleic acid or vector of the invention, whereby a ligand is produced. In other embodiments, the method of producing a ligand further comprises isolating the ligand.

[0077] The invention also relates to a method of inhibiting proliferation of peripheral blood mononuclear cells (PBMC) in an allergen-sensitized subject, comprising administering to a subject a pharmaceutical composition comprising any of the ligands of the invention. In some embodiments, the allergen is selected from house dust mite, cat allergen, grass allergen, mold allergen, and pollen allergen.

[0078] The invention also relates to a method of inhibiting proliferation of B cells in a subject, comprising administering to the subject a pharmaceutical composition comprising a ligand of the invention.

[0079] The invention also relates to a pharmaceutical composition for treating preventing or suppressing a disease as described herein (e.g., Th2-mediated disease, allergic disease, asthma, cancer), comprising as an active ingredient a ligand as described herein.

[0080] The invention also relates to a ligand that has binding specificity for IL-4 and IL-13 comprising a protein moiety that has a binding site with binding specificity for IL-4, and a protein moiety that has a binding site with binding specificity for IL-13, wherein the protein moiety that has binding specificity for IL-4 does not compete for binding with any of the anti-IL-4 dAbs disclosed herein.

[0081] The invention also relates to a ligand that has binding specificity for IL-4 and IL-13 comprising a protein moiety that has a binding site with binding specificity for IL-4, and a protein moiety that has a binding site with binding specificity for IL-13, wherein the protein moiety that has binding specificity for IL-13 does not compete for binding with any of the anti-IL-13 dAbs disclosed herein.

[0082] The invention also relates to a ligand that has binding specificity for IL-4 and IL-13, wherein the ligand is a fusion protein comprising an immunoglobulin single variable domain with binding specificity for IL-4 and an immunoglobulin single variable domain with binding specificity for IL-13, wherein the immunoglobulin single variable domain with binding specificity for IL-4 competes for binding to IL-4 with an anti-IL-4 domain antibody (dAb) selected from the group consisting of DOM9-112-210 and DOM9-155-78, and the immunoglobulin single variable domain with binding specificity for IL-13 competes for binding to IL-13 with an anti-IL-13 domain antibody (dAb) selected from the group consisting of DOM10-53-474 (SEQ ID NO:2369), DOM10-275-78 (SEQ ID NO:2456), DOM10-275-94 (SEQ ID NO:2457), DOM10-275-99 (SEQ ID NO:2458), DOM10-275-100 (SEQ ID NO:2459) and DOM10-275-101 (SEQ ID NO:2460).

[0083] The invention also relates to a ligand that has binding specificity for IL-4 and IL-13, wherein the ligand is a fusion protein comprising an immunoglobulin single variable domain with binding specificity for IL-4 and an immunoglobulin single variable domain with binding specificity for IL-13, wherein the immunoglobulin single variable domain with binding specificity for IL-4 competes for binding to IL-4 with an anti-IL-4 domain antibody (dAb) selected from the group consisting of DOM9-112-210 and DOM9-155-78, and the immunoglobulin single variable domain with binding specificity for IL-13 competes for binding to IL-13 with an anti-IL-13 domain antibody (dAb) selected from the group consisting of DOM10-275-78 (SEQ ID NO:2456), DOM10-275-94 (SEQ ID NO:2457), DOM10-275-99 (SEQ ID NO:2458), DOM10-275-100 (SEQ ID NO:2459) and DOM10-275-101 (SEQ ID NO:2460).

[0084] In some embodiments, the invention relates to a ligand that has binding specificity for IL-13, comprising an immunoglobulin single variable domain with binding specificity for human IL-13 and a non-human IL-13. In preferred embodiments, the non-human IL-13 is selected from rhesus IL-13 and cynomolgous IL-13. It is also preferred that the binding affinity of the immunoglobulin single variable domain for non-human IL-13 and the binding affinity for human IL-13 differ by no more than a factor of 10, 50, 100, 500 or 1000.

[0085] In other embodiments, the invention relates to a ligand that has binding specificity for IL-4 and IL-13, comprising an immunoglobulin single variable domain with binding specificity for IL-4 and an immunoglobulin single variable domain with binding specificity for IL-13, wherein the immunoglobulin single variable domain with binding specifity for IL-4 binds human IL-4 and a non-human IL-4 and the immunoglobulin single variable domain with binding specificity for IL-13 binds human IL-13 and a non-human IL-13. In preferred embodiments, the non-human IL-4 is selected from rhesus IL-4 and cynomolgous IL-4 and the non-human IL-13 is selected from rhesus IL-13 and cynomolgous IL-13. It is also preferred that the binding affinity of the immunoglobulin single variable domain for non-human IL-4 and the binding affinity for human IL-4 differ by no more than a factor of 10, 50, 100, 500 or 1000, and the binding affinity of the immunoglobulin single variable domain for non-human IL-13 and the binding affinity for human IL-13 differ by no more than a factor of 10, 50, 100, 500 or 1000.

### BRIEF DESCRIPTION OF THE DRAWINGS

[0086] FIG. 1A-1U illustrates several nucleotide sequences that encode human (Homo sapiens) V_{H} domain antibodies (dAbs) that specifically bind human IL-4. The nucleotide sequences presented are SEQ ID NOS:1-174.

[0087] FIG. 2A-2J illustrates the amino acid sequences of the dAbs encoded by the nucleic acid sequences shown in FIG. 1A-1U. The amino acid sequences presented are SEQ ID NOS:175-348.

[0088] FIG. 3A-3S illustrates several nucleotide sequences that encode human (Homo sapiens) V_{κ} domain antibodies (dAbs) that specifically bind human IL-4. The nucleotide sequences presented are SEQ ID NOS:349-499.

[0089] FIG. 4A-4H illustrates the amino acid sequences of the dAbs encoded by the nucleic acid sequences shown in FIG. 3A-3S. The amino acid sequences presented are SEQ ID NOS:500-650.

[0090] FIG. 5A-5Z, 5AA-5MM illustrates several nucleotide sequences that encode human (Homo sapiens) V_{H} domain antibodies (dAbs) that specifically bind human IL-13. The nucleotide sequences presented are SEQ ID NOS:651-966.

[0091] FIG. 6A-6Q illustrates the amino acid sequences of the dAbs encoded by the nucleic acid sequences shown in FIG. 5A-5Z, 5AA-5MM. The amino acid sequences presented are SEQ ID NOS:967-1282.

[0092] FIG. 7A-7Z, 7AA-7BB illustrates several nucleotide sequences that encode human (Homo sapiens) V_{κ} domain antibodies (dAbs) that specifically bind human IL-13. The nucleotide sequences presented are SEQ ID NOS:1283-1507.

[0093] FIG. 8A-8L illustrates the amino acid sequences of the dAbs encoded by the nucleic acid sequences shown in FIG. 7A-7Z, 7AA, 7BB. The amino acid sequences presented are SEQ ID NOS:1508-1732.

[0094] FIG. 9A is an alignment of the amino acid sequences of three Vκs that bind mouse serum albumin (MSA). The aligned amino acid sequences are from Vκs designated MSA 16, which is also referred to as DOM7m-16 (SEQ ID NO:2461), MSA 12, which is also referred to as DOM7m-12 (SEQ ID NO:2462), and MSA 26, which is also referred to as DOM7m-26 (SEQ ID NO:2463).

[0095] FIG. 9B is an alignment of the amino acid sequences of six Vκs that bind rat serum albumin (RSA). The aligned amino acid sequences are from Vκs designated DOM7r-1 (SEQ ID NO:1736), DOM7r-3 (SEQ ID NO:1737), DOM7r-4 (SEQ ID NO:1738), DOM7r-5 (SEQ ID NO:1739), DOM7r-7 (SEQ ID NO:1740), and DOM7r-8 (SEQ ID NO:1741).

[0096] FIG. 9C is an alignment of the amino acid sequences of six V_{κ}s that bind human serum albumin (HSA). The aligned amino acid sequences are from V_{κ}s designated DOM7h-2 (SEQ ID NO:1742), DOM7h-3 (SEQ ID NO:1743), DOM7h-4 (SEQ ID NO:1744), DOM7h-6 (SEQ ID NO:1745), DOM7h-1 (SEQ ID NO:1746), and DOM7h-7 (SEQ ID NO:1747).

[0097] FIG. 9D is an alignment of the amino acid sequences of seven V_{H}s that bind human serum albumin and a consensus sequence (SEQ ID NO:1755). The aligned sequences are from V_{H}s designated DOM7h-22 (SEQ ID NO:1748), DOM7h-23 (SEQ ID NO:1749), DOM7h-24 (SEQ ID NO:1750), DOM7h-25 (SEQ ID NO:1751), DOM7h-26 (SEQ ID NO:1752), DOM7h-21 (SEQ ID NO:1753), and DOM7h-27 (SEQ ID NO:1754).

[0098] FIG. 9E is an alignment of the amino acid sequences of three Vκs that bind human serum albumin and rat serum albumin. The aligned amino acid sequences are from Vκs designated DOM7h-8 (SEQ ID NO:1756), DOM7r-13 (SEQ ID NO:1757), and DOM7r-14 (SEQ ID NO:1758).

[0099] FIG. 10 is an illustration of the amino acid sequences of Vκs that bind rat serum albumin (RSA). The illustrated sequences are from Vκs designated DOM7r-15 (SEQ ID NO:1759), DOM7r-16 (SEQ ID NO:1760), DOM7r-17 (SEQ ID NO:1761), DOM7r-18 (SEQ ID NO:1762), DOM7r-19 (SEQ ID NO:1763).

[0100] FIG. 11A-11B is an illustration of the amino acid sequences of the amino acid sequences of V_{H}s that bind rat serum albumin (RSA). The illustrated sequences are from V_{H}s designated DOM7r-20 (SEQ ID NO:1764), DOM7r-21 (SEQ ID NO:1765), DOM7r-22 (SEQ ID NO:1766), DOM7r-23 (SEQ ID NO:1767), DOM7r-24 (SEQ ID NO:1768), DOM7r-25 (SEQ ID NO:1769), DOM7r-26 (SEQ ID NO:1770), DOM7r-27 (SEQ ID NO:1771), DOM7r-28 (SEQ ID NO:1772), DOM7r-29 (SEQ ID NO:1773), DOM7r-30 (SEQ ID NO:1774), DOM7r-31 (SEQ ID NO:1775), DOM7r-32 (SEQ ID NO:1776), and DOM7r-33 (SEQ ID NO:1777).

[0101] FIG. 12 illustrates the amino acid sequences of several Camelid V_{HH}s that bind mouse serum albumin that are disclosed in WO 2004/041862. Sequence A (SEQ ID NO:1778), Sequence B (SEQ ID NO:1779), Sequence C (SEQ ID NO:1780), Sequence D (SEQ ID NO:1781), Sequence E (SEQ ID NO:1782), Sequence F (SEQ ID NO:1783), Sequence G (SEQ ID NO:1784), Sequence H (SEQ ID NO:1785), Sequence I (SEQ ID NO:1786), Sequence J (SEQ ID NO:1787), Sequence K (SEQ ID NO:1788), Sequence L (SEQ ID NO:1789), Sequence M (SEQ ID NO:1790), Sequence N (SEQ ID NO:1791), Sequence 0 (SEQ ID NO:1792), Sequence P (SEQ ID NO:1793) and Sequence Q (SEQ ID NO:1794).

[0102] FIG. 13 is a sensogram showing that some dAbs that bind IL-4 (DOM9-112-22, DOM9-44, and DOM9-155-1) bind to different epitopes on IL-4. IL-4 was immobilized on a surface plasmon resonance chip and a first anti-IL4 dAb was flowed over the surface and then a second dAb was flowed over the surface. This figure shows that DOM9-155-1 did not bind to IL-4 after DOM9-44 was bound. Similarly, DOM9-44 did not bind after DOM9-155-1 was bound. However, the third and fourth peaks show that DOM9-112-22 did bind IL-4 after DOM9-44 was bound and also after DOM9-155-1 was bound, demonstrating that these dAbs bind to different epitopes on the IL-4 antigen.

[0103] FIG. 14A is a graph showing the effect of 100 nM anti-IL-4 dAb (DOM9-44-502) on house dust mite (HDM) induced proliferation of peripheral blood mononuclear cells (PBMC) from twelve individual donors in an in vitro assay. Cell proliferation was assessed by measuring 3[H] thymidine incorporation. The addition of the anti-IL-4 dAb inhibited allergen-induced proliferation of PBMC obtained from ten out of the twelve donors. The average inhibition was 38%.

[0104] FIG. 14B is a graph showing the effect of 100 nM anti-IL-4 dAb (DOM9-155-11) on house dust mite (HDM) induced proliferation of PBMC from twelve individual donors in an in vitro assay. Cell proliferation was assessed by measuring 3[H] thymidine incorporation. The addition of the anti-IL-4 dAb inhibited allergen-induced proliferation of PBMC obtained from ten out of twelve donors. The average inhibition was 34%

[0105] FIG. 15 is a graph showing the effect of anti-IL-13 dAbs DOM10-53-338 and DOM10-176-535 on IL-13-induced B cell proliferation. Cell proliferation was assessed by measuring 3[H] thymidine incorporation. Both dAbs showed an average inhibition of 80% at 10 nM and an average inhibition of 100% at 100 nM concentration.

[0106] FIG. 16A is a graph showing the effect of an extended half-life format dual specific ligand that binds IL-4 and IL-13 (PEGylated DOM9-112 (AST) DOM10-53-343) on IL-4 binding in an IL-4 receptor binding assay. The potency of the anti-IL-4 arm of the dual specific ligand (PEGylated DOM9-112 (AST) DOM10-53-343) was 13 nM. The potency of the dAb DOM9-112 monomer was 3.5 nM. The graph shows that the potency of the dual specific ligand (PEGylated DOM9-112 (AST) DOM10-53-343) was only slightly reduced as compared to the dAb.

[0107] FIG. 16B is a graph showing the effect of an extended half-life format dual specific ligand that binds IL-4 and IL-13 (PEGylated DOM9-112 (AST) DOM10-53-343) on IL-13 binding in an IL-13 receptor binding assay. The potency of the anti-IL-13 arm of the dual specific ligand was 310 pM and the potency of the dAb DOM10-53-343 monomer was 230 pM. The graph shows that the potency of the dual specific ligand was about the same as the dAb monomer.

[0108] FIG. 17A is a graph showing the effect of dual specific ligand (DOM9-112 (ASTKGPS) DOM10-53-344) on IL-4 binding in the IL-4 receptor binding assay. The potency of the anti IL-4 arm of the dual specific ligand and of the dAb DOM9-112 monomer were approximately 1 nM. The graph shows potency of the dual specific ligand was about the same as the dAb monomer.

[0109] FIG. 17B is a graph showing the effect of dual specific ligand (DOM9-112 (ASTKGPS) DOM10-53-344) on IL-13 binding in the IL-13 receptor binding assay. The potency of the anti IL-13 arm of the dual specific ligand was 120 pM. The potency of the dAb DOM10-53-344 monomer was 40 pM. The graph shows potency of the dual specific ligand was only slightly reduced as compared to the dAb monomer.

[0110] FIG. 18A is a graph showing the effect of a dual specific IgG-like format that binds IL-4 and IL-13 (IgG:9-44-502×10-176-535) on IL-4 binding in the IL-4 receptor binding assay. The potency of the dAb DOM9-44-502 monomer was 4 nM and the potency of the dual specific IgG-like format was 13 nM. The graph shows the potency of the anti-IL-4 dAb DOM9-44-502 monomer was reduced by 3-4 fold when formatted into the IgG-like format.

[0111] FIG. 18B is a graph showing the effect of a dual specific IgG-like format that binds IL-4 and IL-13 (IgG:9-44-502×10-176-535) on IL-13 binding in the IL-13 sandwich ELISA. The potency for both the dual specific IgG-like format and the dAb DOM10-176-535 monomer were 1 nM.

[0112] FIG. 19A-19Z, 19AA-19ZZ, 19AAA-19HHH illustrates several nucleotide sequences that encode human (Homo sapiens) domain antibodies (dAbs) that specifically bind human IL-13 and the nucleotide sequences of several primers. The nucleotide sequences presented are SEQ ID NOS:1804-2128.

[0113] FIG. 20A-20Z, 20AA-20CC illustrates the amino acid sequences of the dAbs encoded by the nucleic acid sequences shown in FIG. 19A-19Z, 19AA-19ZZ, 19AAA-19HHH. The amino acid sequences presented are SEQ ID NOS:2129-2392.

[0114] FIG. 21A-21E illustrates several nucleotide sequences that encode human (Homo sapiens) domain antibodies (dAbs) that specifically bind human IL-4. the nucleotide sequences presented are SEQ ID NOS:2393-2425.

[0115] FIG. 22A-22C illustrates the amino acid sequences of the dAbs encoded by the nucleic acid sequences shown in FIG. 21A-21E. The amino acid sequences presented are SEQ ID NOS:2426-2455 and SEQ ID NOS:1733-1735.

[0116] FIG. 23A is a graph showing the percent inhibition of human IL-13 stimulated alkaline phosphatase in HEK293 cells stably transfected with the STAT6 gene. The potencies for the anti-IL-13 dAbs DOM10-53-474 and DOM10-275-78 were 0.63 nM and 2.5 nM respectively.

[0117] FIG. 23B is a graph showing the percent inhibition of cynomolgus IL-13 stimulated alkaline phosphatase in HEK293 cells stably transfected with the STAT6 gene. The potencies for the anti-IL-13 dAbs DOM10-53-474 and DOM10-275-78 were 11.1 nM and 1.4 nM respectively.

[0118] FIG. 24 is a size exclusion chromatography (SEC)-MALLS trace of DOM10-275-78 showing a single peak. The molar mass is the same across the whole width, approximately 13 kDa, meaning that the DOM10-275-78 molecule is mostly a monomer. About 90% of the injected protein was eluted off the column.

[0119] FIG. 25 is a SEC-MALLS trace of DOM10-53-474 showing a single peak, with the molar mass defined as 13 kDa in the right part of the peak, but increasing over the left part of the peak to 18 kDa. This indicates that the majority of the protein is monomer.

[0120] FIG. 26 is a differential scanning calorimetry (DSC) trace of DOM10-275-78 in PBS. The fitted data shows a calorimetry trace and a non-2-state model fit. The calculated Tm value was 49.38° C., ΔH was 6.159E4, and ΔH, was 1.468E5.

[0121] FIG. 27 is a DSC trace of DOM10-275-78 in potassium phosphate. The fitted data shows a calorimetry trace and a non-2-state model fit. The calculated Tm value was 49.77° C., ΔH was 5.975E4, and ΔH, was 1.442E5.

[0122] FIG. 28 is a DSC trace for DOM10-53-474 in PBS. The fitted data shows a calorimetry trace and a non-2-state model fit. The calculated Tm value was 52.89° C., ΔH was 4.529E4, and ΔH, was 1.354E5.

[0123] FIG. 29 is a graph showing the maximum solubility of DOM10-53-474 (open diamonds) and DOM10-275-78 (filled squares) in PBS. The experimental concentration was plotted against the theoretical concentration at that volume (dotted line) and the maximum solubility was taken as the point at which experimental concentration diverged from theoretical. The maximum solubility for both molecules exceeded 100 mg/ml.

[0124] FIG. 30A is an SEC trace for DOM10-53-474 pre- (start material) and post nebulisation (aerosilized material) using a vibrating mesh nebuliser. The SEC profiles of the pre- (start material) and two post-nebulisation (aerosolized material) was identical. No peaks indicative of aggregation were seen post nebulisation.

[0125] FIG. 30B is an SEC trace for DOM10-53-474 pre- and post nebulisation using a jet nebuliser. The SEC profile of the pre- and two post-nebulisation were seen to be identical. No peaks indicative of aggregation were seen post nebulisation.

[0126] FIG. 31 is a table illustrating sandwich ELISA data for DOM10-53-474 pre- and post-nebulisation samples. The samples were analyzed for binding to human IL-13 and the potency was shown to be unaffected by nebulisation. Sample #14 represents 2.3 mg/ml, 25 mM sodium phosphate buffer pH 7.5, 7% (v/v) PEG1000, 1.2% (w/v) sucrose. Sample #15 represents 4.7 mg/mL 25 mM sodium phosphate buffer pH 7.5, 7% (v/v) PEG1000, 1.2% (w/v) sucrose. Sample #16 represents 2.6 mg/mL PBS. The material remaining in the cup after nebulisation is indicated by “CUP” and aerosolized material is indicated by “Aero”.

[0127] FIGS. 32A (normal) and 32B (zoom-in) are an SEC trace of DOM10-275-78 eluted from Protein A resin. The eluted protein was approximately 99% pure, containing approximately 1% of dimeric DOM10-275-78. The retention time was 22.46 minutes.

[0128] FIG. 33 is a chromatogram showing DOM10-275-78 on hydroxyapatite type II. The UV absorbance is shown by the solid line and the conductivity by the dotted line. The separation of both dimer and dAb-PrA complex from dAb monomer can be seen.

[0129] FIG. 34 is an SEC trace measuring the recovery of DOM10-275-78 after hydroxyapatite. The recovery was measured to be 74% based on absorbance at 280 nm and the purity was 100%. The retention time was 22.48 minutes.

[0130] FIG. 35 is a chromatogram showing the elution of DOM10-275-78 from a HIC phenyl column. The UV 280 trace is shown by the solid line and the conductivity by the dotted line.

[0131] FIG. 36 illustrates several nucleotide sequences that encode human domain antibodies (dAbs) that specifically bind human IL-13. The nucleotide sequences presented are SEQ ID NOS:2464-2469.

[0132] FIG. 37 illustrates the amino acid sequences of the dAbs encoded by the nucleic acid sequences shown in FIG. 36. The amino acid sequences presented are SEQ ID NOS:2456-2460.

[0133] FIGS. 38A-D illustrate the codon optimized nucleotide sequences and corresponding amino acid sequences of DOM10-53-474 (SEQ ID NO:2369) and DOM10-275-78 (SEQ ID NO:2456). The nucleotide sequences presented are SEQ ID NOS:2470-2473.

### DETAILED DESCRIPTION OF THE INVENTION

[0134] Within this specification embodiments have been described in a way which enables a clear and concise specification to be written, but it is intended and will be appreciated that embodiments may be variously combined or separated without parting from the invention.

[0135] As used herein, the term “ligand” refers to a compound that comprises at least one peptide, polypeptide or protein moiety that has a binding site with binding specificity for a desired endogenous target compound (e.g., IL-4, IL-13). The ligands according to the invention preferably comprise immunoglobulin variable domains which have different binding specificities, and do not contain variable domain pairs which together form a binding site for target compound (i.e., do not comprise an immunoglobulin heavy chain variable domain and an immunoglobulin light chain variable domain that together form a binding site for IL-4 or IL-13). Preferably each domain which has a binding site that has binding specificity for a target is an immunoglobulin single variable domain (e.g., immunoglobulin single heavy chain variable domain (e.g., V_{H}, V_{HH}), immunoglobulin single light chain variable domain (e.g., V_{L})) that has binding specificity for a desired target (e.g., IL-4, IL-13). Each polypeptide domain which has a binding site that has binding specificity for a target (e.g., IL-4, IL-13) can also comprise one or more complementarity determining regions (CDRs) of an antibody or antibody fragment (e.g., an immunoglobulin single variable domain) that has binding specificity for a desired target (e.g., IL-4, IL-13) in a suitable format, such that the binding domain has binding specificity for the target. For example, the CDRs can be grafted onto a suitable protein scaffold or skeleton, such as an affibody, a SpA scaffold, an LDL receptor class A domain, or an EGF domain. Further, the ligand can be bivalent (heterobivalent) or multivalent (heteromultivalent) as described herein. Thus, “ligands” include polypeptides that comprise two dAbs wherein each dAb binds to a different target (e.g., IL-4, IL-13). Ligands also include polypeptides that comprise at least two dAbs that bind different targets (or the CDRs of dAbs) in a suitable format, such as an antibody format (e.g., IgG-like format, scFv, Fab, Fab′, F(ab′)₂) or a suitable protein scaffold or skeleton, such as an affibody, a SpA scaffold, an LDL receptor class A domain, an EGF domain, avimer and multispecific ligands as described herein.

[0136] The polypeptide domain which has a binding site that has binding specificity for a target (e.g., IL-4, IL-13) can also be a protein domain comprising a binding site for a desired target, e.g., a protein domain is selected from an affibody, a SpA domain, an LDL receptor class A domain, an avimer (see, e.g., U.S. Patent Application Publication Nos. 2005/0053973, 2005/0089932, 2005/0164301). If desired, a “ligand” can further comprise one or more additional moieties, that can each independently be a peptide, polypeptide or protein moiety or a non-peptidic moiety (e.g., a polyalkylene glycol, a lipid, a carbohydrate). For example, the ligand can further comprise a half-life extending moiety as described herein (e.g., a polyalkylene glycol moiety, a moiety comprising albumin, an albumin fragment or albumin variant, a moiety comprising transferrin, a transferrin fragment or transferrin variant, a moiety that binds albumin, a moiety that binds neonatal Fc receptor).

[0137] As used herein, the phrase “target” refers to a biological molecule (e.g., peptide, polypeptide, protein, lipid, carbohydrate) to which a polypeptide domain which has a binding site can bind. The target can be, for example, an intracellular target (e.g., an intracellular protein target), a soluble target (e.g., a secreted protein such as IL-4, IL-13), or a cell surface target (e.g., a membrane protein, a receptor protein). Preferably, the target is IL-4 or IL-13.

[0138] The phrase “immunoglobulin single variable domain” refers to an antibody variable region (V_{H}, V_{HH}, V_{L}) that specifically binds a target, antigen or epitope independently of other V domains; however, as the term is used herein, an immunoglobulin single variable domain can be present in a format (e.g., hetero-multimer) with other variable regions or variable domains where the other regions or domains are not required for antigen binding by the single immunoglobulin variable domain (i.e., where the immunoglobulin single variable domain binds antigen independently of the additional variable domains). Each “immunoglobulin single variable domain” encompasses not only an isolated antibody single variable domain polypeptide, but also larger polypeptides that comprise one or more monomers of an antibody single variable domain polypeptide sequence. A “domain antibody” or “dAb” is the same as an “immunoglobulin single variable domain” polypeptide as the term is used herein. An immunoglobulin single variable domain polypeptide, is preferably a mammalian immunoglobulin single variable domain polypeptide, more preferably human, and includes rodent immunoglobulin single variable domains (for example, as disclosed in WO 00/29004, the contents of which are incorporated herein by reference in their entirety) and camelid V_{HH} dAbs. As used herein, camelid dAbs are immunoglobulin single variable domain polypeptides which are derived from species including camel, llama, alpaca, dromedary, and guanaco, and comprise heavy chain antibodies naturally devoid of light chain (V_{HH}). Similar dAbs, can be obtained from single chain antibodies from other species, such as nurse shark. Preferred ligands comprises at least two different immunoglobulin single variable domain polypeptides or at least two different dAbs.

[0139] The immunoglobulin single variable domains (dAbs) described herein contain complementarity determining regions (CDR1, CDR2 and CDR3). The locations of CDRs and frame work (FR) regions and a numbering system have been defined by Kabat et al. (Kabat, E. A. et al., Sequences of Proteins of Immunological Interest, Fifth Edition, U.S. Department of Health and Human Services, U.S. Government Printing Office (1991)). The amino acid sequences of the CDRs (CDR1, CDR2, CDR3) of the V_{H} and V_{κ} dAbs disclosed herein will be readily apparent to the person of skill in the art based on the well known Kabat amino acid numbering system and definition of the CDRs. According to the Kabat numbering system V_{L} (V_{κ} or V_{λ}) CDR1 is from position 24-34, V_{L} CDR2 is from position 50-56, V_{L} CDR3 is from position 89-97, and V_{H} CDR1 is from position 31-35, V_{H} CDR2 is from position 50-65 and V_{H} CDR3 is from position 95-102. Heavy chain CDR-H3 have varying lengths, insertions are numbered between residue H100 and H101 with letters up to K (i.e. H100, H100A . . . H100K, H101). Residue 103 which is the start of FR4 is almost always a W.

[0140] As used herein “interleukin-4” (IL-4) refers to naturally occurring or endogenous mammalian IL-4 proteins and to proteins having an amino acid sequence which is the same as that of a naturally occurring or endogenous corresponding mammalian IL-4 protein (e.g., recombinant proteins, synthetic proteins (i.e., produced using the methods of synthetic organic chemistry)). Accordingly, as defined herein, the term includes mature IL-4 protein, polymorphic or allelic variants, and other isoforms of an IL-4 and modified or unmodified forms of the foregoing (e.g., lipidated, glycosylated). Naturally occurring or endogenous IL-4 includes wild type proteins such as mature IL-4, polymorphic or allelic variants and other isoforms and mutant forms which occur naturally in mammals (e.g., humans, non-human primates). Such proteins can be recovered or isolated from a source which naturally produces IL-4, for example. These proteins and proteins having the same amino acid sequence as a naturally occurring or endogenous corresponding IL-4, are referred to by the name of the corresponding mammal. For example, where the corresponding mammal is a human, the protein is designated as a human IL-4. Several mutant IL-4 proteins are known in the art, such as those disclosed in WO 03/038041.

[0141] As used herein “interleukin-13” (IL-13) refers to naturally occurring or endogenous mammalian IL-13 proteins and to proteins having an amino acid sequence which is the same as that of a naturally occurring or endogenous corresponding mammalian IL-13 protein (e.g., recombinant proteins, synthetic proteins (i.e., produced using the methods of synthetic organic chemistry)). Accordingly, as defined herein, the term includes mature IL-13 protein, polymorphic or allelic variants, and other isoforms of IL-13 (e.g., produced by alternative splicing or other cellular processes), and modified or unmodified forms of the foregoing (e.g., lipidated, glycosylated). Naturally occurring or endogenous IL-13 include wild type proteins such as mature IL-13, polymorphic or allelic variants and other isoforms and mutant forms which occur naturally in mammals (e.g., humans, non-human primates). For example, as used herein IL-13 encompasses the human IL-13 variant in which Arg at position 110 of mature human IL-13 is replaced with Gln (position 110 of mature IL-13 corresponds to position 130 of the precursor protein) which is associed with asthma (atopic and nonatopic asthma) and other variants of IL-13. (Heinzmann et al., Hum Mol. Genet. 9:549-559 (2000).) Such proteins can be recovered or isolated from a source which naturally produces IL-13, for example. These proteins and proteins having the same amino acid sequence as a naturally occurring or endogenous corresponding IL-13, are referred to by the name of the corresponding mammal. For example, where the corresponding mammal is a human, the protein is designated as a human IL-13. Several mutant IL-13 proteins are known in the art, such as those disclosed in WO 03/035847.

[0142] “Affinity” and “avidity” are terms of art that describe the strength of a binding interaction. With respect to the ligands of the invention, avidity refers to the overall strength of binding between the targets (e.g., first cell surface target and second cell surface target) on the cell and the ligand. Avidity is more than the sum of the individual affinities for the individual targets.

[0143] As used herein, “toxin moiety” refers to a moiety that comprises a toxin. A toxin is an agent that has deleterious effects on or alters cellular physiology (e.g., causes cellular necrosis, apoptosis or inhibits cellular division).

[0144] As used herein, the term “dose” refers to the quantity of ligand administered to a subject all at one time (unit dose), or in two or more administrations over a defined time interval. For example, dose can refer to the quantity of ligand (e.g., ligand comprising an immunoglobulin single variable domain that binds IL-4 and an immunoglobulin single variable domain that binds IL-13) administered to a subject over the course of one day (24 hours) (daily dose), two days, one week, two weeks, three weeks or one or more months (e.g., by a single administration, or by two or more administrations). The interval between doses can be any desired amount of time.

[0145] As used herein “complementary” refers to when two immunoglobulin domains belong to families of structures which form cognate pairs or groups or are derived from such families and retain this feature. For example, a V_{H} domain and a V_{L} domain of an antibody are complementary; two V_{H} domains are not complementary, and two V_{L} domains are not complementary. Complementary domains may be found in other members of the immunoglobulin superfamily, such as the V_{α} and V_{β} (or γ and δ) domains of the T-cell receptor. Domains which are artificial, such as domains based on protein scaffolds which do not bind epitopes unless engineered to do so, are non-complementary. Likewise, two domains based on (for example) an immunoglobulin domain and a fibronectin domain are not complementary.

[0146] As used herein, “immunoglobulin” refers to a family of polypeptides which retain the immunoglobulin fold characteristic of antibody molecules, which contains two β sheets and, usually, a conserved disulphide bond. Members of the immunoglobulin superfamily are involved in many aspects of cellular and non-cellular interactions in vivo, including widespread roles in the immune system (for example, antibodies, T-cell receptor molecules and the like), involvement in cell adhesion (for example the ICAM molecules) and intracellular signaling (for example, receptor molecules, such as the PDGF receptor). The present invention is applicable to all immunoglobulin superfamily molecules which possess binding domains. Preferably, the present invention relates to antibodies.

[0147] As used herein “domain” refers to a folded protein structure which retains its tertiary structure independently of the rest of the protein. Generally, domains are responsible for discrete functional properties of proteins, and in many cases may be added, removed or transferred to other proteins without loss of function of the remainder of the protein and/or of the domain. By single antibody variable domain is meant a folded polypeptide domain comprising sequences characteristic of antibody variable domains. It therefore includes complete antibody variable domains and modified variable domains, for example in which one or more loops have been replaced by sequences which are not characteristic of antibody variable domains, or antibody variable domains which have been truncated or comprise N- or C-terminal extensions, as well as folded fragments of variable domains which retain at least in part the binding activity and specificity of the full-length domain. Thus, each ligand comprises at least two different domains.

[0148] “Repertoire” A collection of diverse variants, for example polypeptide variants which differ in their primary sequence. A library that encompasses a repertoire of polypeptides preferably comprises at least 1000 members.

[0149] “Library” The term library refers to a mixture of heterogeneous polypeptides or nucleic acids. The library is composed of members, each of which have a single polypeptide or nucleic acid sequence. To this extent, library is synonymous with repertoire. Sequence differences between library members are responsible for the diversity present in the library. The library may take the form of a simple mixture of polypeptides or nucleic acids, or may be in the form of organisms or cells, for example bacteria, viruses, animal or plant cells and the like, transformed with a library of nucleic acids. Preferably, each individual organism or cell contains only one or a limited number of library members. Advantageously, the nucleic acids are incorporated into expression vectors, in order to allow expression of the polypeptides encoded by the nucleic acids. In a preferred aspect, therefore, a library may take the form of a population of host organisms, each organism containing one or more copies of an expression vector containing a single member of the library in nucleic acid form which can be expressed to produce its corresponding polypeptide member. Thus, the population of host organisms has the potential to encode a large repertoire of genetically diverse polypeptide variants.

[0150] As used herein an antibody refers to IgG, IgM, IgA, IgD or IgE or a fragment (such as a Fab, F(ab′)₂, Fv, disulphide linked Fv, scFv, closed conformation multispecific antibody, disulphide-linked scFv, diabody) whether derived from any species naturally producing an antibody, or created by recombinant DNA technology; whether isolated from serum, B-cells, hybridomas, transfectomas, yeast or bacteria.

[0151] As described herein an “antigen’ is a molecule that is bound by a binding domain according to the present invention. Typically, antigens are bound by antibody ligands and are capable of raising an antibody response in vivo. It may be a polypeptide, protein, nucleic acid or other molecule. Generally, the dual-specific ligands according to the invention are selected for target specificity against two particular targets (e.g., antigens). In the case of conventional antibodies and fragments thereof, the antibody binding site defined by the variable loops (L1, L2, L3 and H1, H2, H3) is capable of binding to the antigen.

[0152] An “epitope” is a unit of structure conventionally bound by an immunoglobulin V_{H}/V_{L} pair. Epitopes define the minimum binding site for an antibody, and thus represent the target of specificity of an antibody. In the case of a single domain antibody, an epitope represents the unit of structure bound by a variable domain in isolation.

[0153] “Universal framework” refers to a single antibody framework sequence corresponding to the regions of an antibody conserved in sequence as defined by Kabat (“Sequences of Proteins of Immunological Interest”, US Department of Health and Human Services) or corresponding to the human germline immunoglobulin repertoire or structure as defined by Chothia and Lesk, (1987) J. Mol. Biol. 196:910-917. The invention provides for the use of a single framework, or a set of such frameworks, which has been found to permit the derivation of virtually any binding specificity through variation in the hypervariable regions alone.

[0154] The phrase, “half-life,” refers to the time taken for the serum concentration of the ligand to reduce by 50%, in vivo, for example due to degradation of the ligand and/or clearance or sequestration of the dual-specific ligand by natural mechanisms. The ligands of the invention are stabilized in vivo and their half-life increased by binding to molecules which resist degradation and/or clearance or sequestration. Typically, such molecules are naturally occurring proteins which themselves have a long half-life in vivo. The half-life of a ligand is increased if its functional activity persists, in vivo, for a longer period than a similar ligand which is not specific for the half-life increasing molecule. Thus a ligand specific for HSA and two target molecules is compared with the same ligand wherein the specificity to HSA is not present, that is does not bind HSA but binds another molecule. For example, it may bind a third target on the cell. Typically, the half-life is increased by 10%, 20%, 30%, 40%, 50% or more. Increases in the range of 2×, 3×, 4×, 5×, 10×, 20×, 30×, 40×, 50× or more of the half-life are possible. Alternatively, or in addition, increases in the range of up to 30×, 40×, 50×, 60×, 70×, 80×, 90×, 100×, 150× of the half life are possible.

[0155] As referred to herein, the term “competes” means that the binding of a first target to its cognate target binding domain is inhibited when a second target is bound to its cognate target binding domain. For example, binding may be inhibited sterically, for example by physical blocking of a binding domain or by alteration of the structure or environment of a binding domain such that its affinity or avidity for a target is reduced.

[0156] As used herein, “epitopic specificity” refers to the fine specificity of an antigen binding moiety or domain, e.g., an antibody or antigen binding fragment thereof, such as a dAb, defined by the epitope that it binds, rather than the antigen that it binds. Two ligands (e.g. dAbs) that have the same epitopic specificity bind to the same epitope.

[0157] As used herein, the term “inhibits” means to reduce and or prevent (i.e., both partial or complete inhibition is encompassed). For example, a dAb may prevent binding of a ligand (e.g., a different dAb) to its target, or inhibit binding of a ligand (e.g., a different dAb) to its target by at least about 25%, at least about 50%, at least about 60%, at least about 70%, at least about 80%, at least about 85%, at least about 90%, or at least about 95%.

[0158] As used herein, the terms “low stringency,” “medium stringency,” “high stringency,” or “very high stringency conditions” describe conditions for nucleic acid hybridization and washing. Guidance for performing hybridization reactions can be found in Current Protocols in Molecular Biology, John Wiley & Sons, N.Y. (1989), 6.3.1-6.3.6, which is incorporated herein by reference in its entirety. Aqueous and nonaqueous methods are described in that reference and either can be used. Specific hybridization conditions referred to herein are as follows: (1) low stringency hybridization conditions in 6× sodium chloride/sodium citrate (SSC) at about 45° C., followed by two washes in 0.2×SSC, 0.1% SDS at least at 50° C. (the temperature of the washes can be increased to 55° C. for low stringency conditions); (2) medium stringency hybridization conditions in 6×SSC at about 45° C., followed by one or more washes in 0.2×SSC, 0.1% SDS at 60° C.; (3) high stringency hybridization conditions in 6×SSC at about 45° C., followed by one or more washes in 0.2×SSC, 0.1% SDS at 65° C.; and preferably (4) very high stringency hybridization conditions are 0.5M sodium phosphate, 7% SDS at 65° C., followed by one or more washes at 0.2×SSC, 1% SDS at 65° C. Very high stringency conditions (4) are the preferred conditions and the ones that should be used unless otherwise specified.

[0159] Sequences similar or homologous (e.g., at least about 70% sequence identity) to the sequences disclosed herein are also part of the invention. In some embodiments, the sequence identity at the amino acid level can be about 80%, 85%, 90%, 91%, 92%, 93%, 94%, 95%, 96%, 97%, 98%, 99% or higher. At the nucleic acid level, the sequence identity can be about 70%, 75%, 80%, 85%, 90%, 91%, 92%, 93%, 94%, 95%, 96%, 97%, 98%, 99% or higher. Alternatively, substantial identity exists when the nucleic acid segments will hybridize under selective hybridization conditions (e.g., very high stringency hybridization conditions), to the complement of the strand. The nucleic acids may be present in whole cells, in a cell lysate, or in a partially purified or substantially pure form.

[0160] Calculations of “homology” or “sequence identity” or “similarity” between two sequences (the terms are used interchangeably herein) are performed as follows. The sequences are aligned for optimal comparison purposes (e.g., gaps can be introduced in one or both of a first and a second amino acid or nucleic acid sequence for optimal alignment and non-homologous sequences can be disregarded for comparison purposes). In a preferred embodiment, the length of a reference sequence aligned for comparison purposes is at least 30%, preferably at least 40%, more preferably at least 50%, even more preferably at least 60%, and even more preferably at least 70%, 80%, 90%, 100% of the length of the reference sequence. The amino acid residues or nucleotides at corresponding amino acid positions or nucleotide positions are then compared. When a position in the first sequence is occupied by the same amino acid residue or nucleotide as the corresponding position in the second sequence, then the molecules are identical at that position (as used herein amino acid or nucleic acid “homology” is equivalent to amino acid or nucleic acid “identity”). The percent identity between the two sequences is a function of the number of identical positions shared by the sequences, taking into account the number of gaps, and the length of each gap, which need to be introduced for optimal alignment of the two sequences.

[0161] Amino acid and nucleotide sequence alignments and homology, similarity or identity, as defined herein are preferably prepared and determined using the algorithm BLAST 2 Sequences, using default parameters (Tatusova, T. A. et al., FEMS Microbiol Lett, 174:187-188 (1999)). Alternatively, the BLAST algorithm (version 2.0) is employed for sequence alignment, with parameters set to default values. BLAST (Basic Local Alignment Search Tool) is the heuristic search algorithm employed by the programs blastp, blastn, blastx, tblastn, and tblastx; these programs ascribe significance to their findings using the statistical methods of Karlin and Altschul, 1990, Proc. Natl. Acad. Sci. USA 87(6):2264-8.

[0162] Unless defined otherwise, all technical and scientific terms used herein have the same meaning as commonly understood by one of ordinary skill in the art (e.g., in cell culture, molecular genetics, nucleic acid chemistry, hybridization techniques and biochemistry). Standard techniques are used for molecular, genetic and biochemical methods (see generally, Sambrook et al., Molecular Cloning: A Laboratory Manual, 2d ed. (1989) Cold Spring Harbor Laboratory Press, Cold Spring Harbor, N.Y. and Ausubel et al., Short Protocols in Molecular Biology (1999) 4^{th} Ed, John Wiley & Sons, Inc. which are incorporated herein by reference) and chemical methods.

[0163] The invention relates to ligands that have binding specificity for IL-4 (e.g., human IL-4), ligands that have binding specificity for IL-13 (e.g., human IL-13), and to ligands that have binding specificity for IL-4 and IL-13 (e.g., human IL-4 and human IL-13). For example, the ligand can comprise a polypeptide domain having a binding site with binding specificity for IL-4, a polypeptide domain having a binding site with binding specificity IL-13, or comprise a polypeptide domain having a binding site with binding specificity for IL-4 and a polypeptide domain having a binding site with binding specificity for IL-13.

[0164] The invention also relates to ligands that have cross-reactivity with human IL-4 and a non-human IL-4 (e.g., rhesus IL-4, cynomolgous IL-4), ligands that have cross-reactivity with human IL-13 and a non-human IL-13 (e.g., rhesus IL-13, cynomolgous IL-13), and to ligands that have binding specificity for human IL-4, human IL-13, non-human IL-4 and non-human IL-13 (e.g., rhesus IL-4, rhesus IL-13, cynomolgous IL-4 and cynomolgous IL-13).

[0165] The ligands of the invention provide several advantages. For example, as described herein, the ligand can be tailored to have a desired in vivo serum half-life. Domain antibodies are much smaller than conventional antibodies, and can be administered to achieve better tissue penetration than conventional antibodies. Thus, dAbs and ligands that comprise a dAb provide advantages over conventional antibodies when administered to treat disease, such as Th2-mediated disease, asthma, allergic diseases, cancer (e.g., renal cell cancer). For example, asthma (e.g. allergic asthma) can be IgE-mediated or non-IgE-mediated, and ligands that have binding specificity for IL-4, IL-13 or IL-4 and IL-13 can be administered to treat both IgE-mediated and non-IgE-mediated asthma.

[0166] Similarly, due to the overlap and similarity in the biological activity of IL-4 and IL-13, therapy with agents that bind and inhibit only one of these cytokines may not produce the desired effects in all circumstances. Accordingly, ligands that have binding specificity for IL-4 and IL-13 can be administered to a patient (e.g., a patient with allergic disease (e.g., allergic asthma)) to provide superior therapy using a single therapeutic agent.

[0167] In some embodiments, the ligand has binding specificity for IL-4 and comprises an (at least one) immunoglobulin single variable domain with binding specificity for IL-4. In other embodiments, the ligand has binding specificity for IL-13 and comprises an (at least one) immunoglobulin single variable domain with binding specificity for IL-13. In certain embodiments, the ligand has binding specificity for IL-4 and IL-13, and comprises an (at least one) immunoglobulin single variable domain with binding specificity for IL-4 and an (at least one) immunoglobulin single variable domain with binding specificity for IL-13.

[0168] The ligand of the invention can be formatted as described herein. For example, the ligand of the invention can be formatted to tailor in vivo serum half-life. If desired, the ligand can further comprise a toxin or a toxin moiety as described herein. In some embodiments, the ligand comprises a surface active toxin, such as a free radical generator (e.g., selenium containing toxin) or a radionuclide. In other embodiments, the toxin or toxin moiety is a polypeptide domain (e.g., a dAb) having a binding site with binding specificity for an intracellular target. In particular embodiments, the ligand is an IgG-like format that has binding specificity for IL-4 and IL-13 (e.g., human IL-4 and human IL-13).

[0169] In one aspect, the invention relates to a ligand that has binding specificity for interleukin-4 (IL-4) and interleukin-13 (IL-13) comprising a protein moiety that has a binding site with binding specificity for IL-4; and a protein moiety that has a binding site with binding specificity for IL-13. The ligand that has binding specificity for IL-4 and IL-13 of this aspect of the invention, can be further characterized by any one or any combination of the following: (1) the proviso that said protein moiety that has a binding site with binding specificity for IL-4 is not an IL-4 receptor or IL-4-binding portion thereof, and said protein moiety that has a binding site with binding specificity for IL-13 is not an IL-13 receptor or IL-13-binding portion thereof; (2) the proviso that said binding site with binding specificity for IL-4 and said binding site with binding specificity for IL-13 each consist of a single amino acid chain; (3) the proviso that neither said binding site with binding specificity for IL-4 nor said binding site with binding specificity for IL-13 comprise an immunoglobulin heavy chain variable domain and an immunoglobulin light chain variable domain; and (4) the proviso that said protein moiety that has a binding site with binding specificity for IL-4 is not an antibody that binds IL-4 or an antigen-binding fragment thereof that comprises an immunoglobulin heavy chain variable domain and an immunoglobulin light chain variable domain that together form a binding site for IL-4, and said protein moiety that has a binding site with binding specificity for IL-13 is not an antibody that binds IL-13 or an antigen-binding fragment thereof that comprises an immunoglobulin heavy chain variable domain and an immunoglobulin light chain variable domain that together form a binding site for IL-13.

[0170] In one aspect, the invention relates to a ligand that has binding specificity for IL-4, comprising a protein moiety that has a binding site with binding specificity for IL-4. The ligand that has binding specificity for IL-4 of this aspect of the invention, can be further characterized by any one or any combination of the following: (1) the proviso that said protein moiety that has a binding site with binding specificity for IL-4 is not an antibody that binds IL-4 or an antigen-binding fragment thereof that comprises an immunoglobulin heavy chain variable domain and an immunoglobulin light chain variable domain that together form a binding site for IL-4; (2) the proviso that said protein moiety that has a binding site with binding specificity for IL-4 is not an IL-4 receptor or IL-4-binding portion thereof; (3) the proviso that said binding site with binding specificity for IL-4 consists of a single amino acid chain; and (4) the proviso that said binding site with binding specificity for IL-4 does not consist of an immunoglobulin heavy chain variable domain and an immunoglobulin light chain variable domain.

[0171] In one aspect, the invention relates to a ligand that has binding specificity for IL-13, comprising a protein moiety that has a binding site with binding specificity for IL-13. The ligand that has binding specificity for IL-13 of this aspect of the invention, can be further characterized by any one or any combination of the following: (1) the proviso that said protein moiety that has a binding site with binding specificity for IL-13 is not an antibody that binds IL-13 or an antigen-binding fragment thereof that comprises an immunoglobulin heavy chain variable domain and an immunoglobulin light chain variable domain that together form a binding site for IL-13; (2) the proviso that said protein moiety that has a binding site with binding specificity for IL-13 is not an IL-13 receptor or IL-13-binding portion thereof; (3) the proviso that said binding site with binding specificity for IL-13 consists of a single amino acid chain; and (4) the proviso that said binding site with binding specificity for IL-13 does not consist of an immunoglobulin heavy chain variable domain and an immunoglobulin light chain variable domain.

### Ligand Formats

[0172] The ligand of the invention can be formatted as a monospecific, dual specific or multispecific ligand as described herein. See, also WO 03/002609, the entire teachings of which are incorporated herein by reference, regarding ligand formatting. Such dual specific ligands comprise immunoglobulin single variable domains that have different binding specificities. Such dual specific ligands can comprise combinations of heavy and light chain domains. For example, the dual specific ligand may comprise a V_{H} domain and a V_{L} domain, which may be linked together in the form of an scFv (e.g., using a suitable linker such as Gly₄Ser), or formatted into a bispecific antibody or antigen-binding fragment thereof (e.g. F(ab′)₂, Fab′, Fab fragment). The dual specific ligands do not comprise complementary V_{H}/V_{L} pairs which form a conventional two chain antibody antigen-binding site that binds antigen or epitope co-operatively. Instead, the dual format ligands can comprise a V_{H}/V_{L} complementary pair, wherein the V domains have different binding specificities.

[0173] The ligand (e.g., monospecific, dual specific ligands) may comprise one or more C_{H} or C_{L} domains if desired. A hinge region domain may also be included if desired. Such combinations of domains may, for example, mimic natural antibodies, such as IgG or IgM, or fragments thereof, such as Fv, scFv, Fab or F(ab′)₂ molecules. Other structures, such as a single arm of an IgG molecule comprising V_{H}, V_{L}, C_{H}1 and C_{L} domains, are envisaged. The ligand can comprise a heavy chain constant region of an immunoglobulin (e.g., IgG (e.g., IgG1, IgG2, IgG3, IgG4) IgM, IgA, IgD or IgE) or portion thereof (e.g., Fc portion) and/or a light chain constant region (e.g., C_{λ}, C_{κ}). For example, the ligand can comprise CH1 of IgG1 (e.g., human IgG1), CH1 and CH2 of IgG1 (e.g., human IgG1), CH1, CH2 and CH3 of IgG1 (e.g., human IgG1), CH2 and CH3 of IgG1 (e.g., human IgG1), or CH1 and CH3 of IgG1 (e.g., human IgG1).

[0174] In one example, a dual specific ligand of the invention comprises only two variable domains although several such ligands may be incorporated together into the same protein, for example two such ligands can be incorporated into an IgG or a multimeric immunoglobulin, such as IgM. Alternatively, in another embodiment a plurality of dual specific ligands are combined to form a multimer. For example, two different dual specific ligands are combined to create a tetra-specific molecule. It will be appreciated by one skilled in the art that the light and heavy variable regions of a dual-specific ligand of the present invention may be on the same polypeptide chain, or alternatively, on different polypeptide chains. In the case that the variable regions are on different polypeptide chains, then they may be linked via a linker, generally a flexible linker (such as a polypeptide chain), a chemical linking group, or any other method known in the art.

[0175] Ligands can be formatted as bi- or multispecific antibodies or antibody fragments or into bi- or multispecific non-antibody structures. Suitable formats include, any suitable polypeptide structure in which an antibody variable domain or one or more of the CDRs thereof can be incorporated so as to confer binding specificity for antigen on the structure. A variety of suitable antibody formats are known in the art, such as, bispecific IgG-like formats (e.g., chimeric antibodies, humanized antibodies, human antibodies, single chain antibodies, heterodimers of antibody heavy chains and/or light chains, antigen-binding fragments of any of the foregoing (e.g., a Fv fragment (e.g., single chain Fv (scFv), a disulfide bonded Fv), a Fab fragment, a Fab′ fragment, a F(ab′)₂ fragment), a single variable domain (e.g., V_{H}, V_{L}, V_{HH}), a dAb, and modified versions of any of the foregoing (e.g., modified by the covalent attachment of polyalkylene glycol (e.g., polyethylene glycol, polypropylene glycol, polybutylene glycol) or other suitable polymer). See, PCT/GB03/002804, filed Jun. 30, 2003, which designated the United States, (WO 2004/081026) regarding PEGylated of single variable domains and dAbs, suitable methods for preparing same, increased in vivo half life of the PEGylated single variable domains and dAb monomers and multimers, suitable PEGs, preferred hydrodynamic sizes of PEGs, and preferred hydrodynamic sizes of PEGylated single variable domains and dAb monomers and multimers. The entire teaching of PCT/GB03/002804 (WO 2004/081026), including the portions referred to above, are incorporated herein by reference.

[0176] The ligand can be formatted using a suitable linker such as (Gly₄Ser)ₙ, where n=from 1 to 8, (e.g., 1, 2, 3, 4, 5, 6 or 7). If desired, ligands, including dAb monomers, dimers and trimers, can be linked to an antibody Fc region, comprising one or both of C_{H}2 and C_{H}3 domains, and optionally a hinge region. For example, vectors encoding ligands linked as a single nucleotide sequence to an Fc region may be used to prepare such polypeptides.

[0177] Ligands and dAb monomers can also be combined and/or formatted into non-antibody multi-ligand structures to form multivalent complexes, which bind target molecules with the same antigen, thereby providing superior avidity. For example natural bacterial receptors such as SpA can been used as scaffolds for the grafting of CDRs to generate ligands which bind specifically to one or more epitopes. Details of this procedure are described in U.S. Pat. No. 5,831,012. Other suitable scaffolds include those based on fibronectin and affibodies. Details of suitable procedures are described in WO 98/58965. Other suitable scaffolds include lipocallin and CTLA4, as described in van den Beuken et al., J. Mol. Biol. 310:591-601 (2001), and scaffolds such as those described in WO 00/69907 (Medical Research Council), which are based for example on the ring structure of bacterial GroEL or other chaperone polypeptides. Protein scaffolds may be combined; for example, CDRs may be grafted on to a CTLA4 scaffold and used together with immunoglobulin V_{H} or V_{L} domains to form a ligand. Likewise, fibronectin, lipocallin and other scaffolds may be combined

[0178] A variety of suitable methods for preparing any desired format are known in the art. For example, antibody chains and formats (e.g., monospecific, bispecific, trispecific or tetraspecific IgG-like formats, chimeric antibodies, humanized antibodies, human antibodies, single chain antibodies, homodimers and heterodimers of antibody heavy chains and/or light chains) can be prepared by expression of suitable expression constructs and/or culture of suitable cells (e.g., hybridomas, heterohybridomas, recombinant host cells containing recombinant constructs encoding the format). Further, formats such as antigen-binding fragments of antibodies or antibody chains (e.g., bispecific binding fragments, such as a Fv fragment (e.g., single chain Fv (scFv), a disulfide bonded Fv), a Fab fragment, a Fab′ fragment, a F(ab′)₂ fragment), can be prepared by expression of suitable expression constructs or by enzymatic digestion of antibodies, for example using papain or pepsin.

[0179] The ligand can be formatted as a multispecific ligand, for example as described in WO 03/002609, the entire teachings of which are incorporated herein by reference. Such multispecific ligand possesses more than one epitope binding specificity. Generally, the multi-specific ligand comprises two or more epitope binding domains, such dAbs or non-antibody protein domain comprising a binding site for an epitope, e.g., an affibody, a SpA domain, an LDL receptor class A domain, an EGF domain, an avimer. Multispecific ligands can be formatted further as described herein.

[0180] In some embodiments, the ligand is an IgG-like format. Such formats have the conventional four chain structure of an IgG molecule (2 heavy chains and two light chains), in which one or more of the variable regions (V_{H} and or V_{L}) have been replaced with a dAb or immunoglobulin single variable domain of a desired specificity. Preferably, each of the variable regions (2 V_{H} regions and 2 V_{L} regions) is replaced with a dAb or immunoglobulin single variable domain. The dAb(s) or immunoglobulin single variable domain(s) that are included in an IgG-like format can have the same specificity or different specificities. In some embodiments, the IgG-like format is tetravalent and can have one, two, three or four specificities. The IgG-like format can be bispecific and comprise, for example, a first and second dAb that have the same specificity, a third dAb with a different specificity and a fourth dAb with a different specificity from the first, second and third dAbs; or tetraspecific and comprise four dAbs that each have a different specificity.

[0181] The IgG-like format can be monospecific and comprise 4 dAbs that have the specificity for IL-4 or for IL-13. The IgG-like format can be bispecific and comprise, for example, 3 dAbs that have specificity for IL-4 and another dAb that has specificity for IL-13, or bispecific and comprise, for example two dAbs that have specificity for IL-4 and two dAbs that have specificity for IL-13. The IgG-like format can be bispecific and comprise, for example, 3 dAbs that have specificity for IL-13 and another dAb that has specificity for IL-14. When the IgG-like format contains two or more dAbs that bind IL-4, the dAbs can bind to the same or different epitopes. For example, the IgG-like format can comprise two, three or four dAbs that have binding specificity for IL-4 that bind the same or different epitopes on IL-4. Similarly, when the IgG-like format contains two or more dAbs that bind IL-13, the dAbs can bind to the same or different epitopes. For example, the IgG-like format can comprise two, three or four dAbs that have binding specificity for IL-13 that bind the same or different epitopes on IL-13.

[0182] In one example, the IgG-like format is a tetravalent IgG-like ligand that has binding specificity for IL-4 or IL-13 comprising two heavy chains and two light chains, wherein said heavy chains comprise the constant region of an immunoglobulin heavy chain and a single immunoglobulin variable domain that has binding specificity for IL-4 or IL-13; and said light chains comprise the constant region of an immunoglobulin light chain and a single immunoglobulin variable domain that has binding specificity for IL-4 or IL-13. The IgG-like format of this example can be further characterized by the proviso that when said heavy chains comprise a single immunoglobulin variable domain that has binding specificity for IL-4, said light chains comprise a single immunoglobulin variable domain that has binding specificity for IL-13; and when said heavy chains comprise a single immunoglobulin variable domain that has binding specificity for IL-13, said light chains comprise a single immunoglobulin variable domain that has binding specificity for IL-4.

[0183] Antigen-binding fragments of IgG-like formats (e.g., Fab, F(ab′)₂, Fab′, Fv, scFv) can be prepared. In addition, a particular constant region or Fc portion (e.g., constant region or Fc portion of an IgG, such as IgG1 (e.g., CH1, CH2 and CH3; CH2 and CH3)), variant or portion thereof can be selected in order to tailor effector function. For example, if complement activation and/or antibody dependent cellular cytotoxicity (ADCC) function is desired, the ligand can be an IgG1-like format. If desired, the IgG-like format can comprise a mutated constant region (variant IgG heavy chain constant region) to minimize binding to Fc receptors and/or ability to fix complement. (see e.g Winter et al, GB 2,209,757 B; Morrison et al., WO 89/07142; Morgan et al., WO 94/29351, Dec. 22, 1994).

[0184] The ligands of the invention can be formatted as a fusion protein that contains a first immunoglobulin single variable domain that is fused directly (e.g., through a peptide bond) or through a suitable linker (amino acid, peptide, polypeptide) to a second immunoglobulin single variable domain. If desired such a format can further comprise, for example, one or more immunoglobulin domains (e.g., constant region, Fc portion) and/or a half life extending moiety as described herein. For example, the ligand can comprise a first immunoglobulin single variable domain that is fused directly to a second immunoglobulin single variable domain that is fused directly to an immunoglobulin single variable domain that binds serum albumin.

[0185] In one example, the ligand comprises a first single immunoglobulin single variable domain, a second immunoglobulin single variable domain and an Fc portion or an immunoglobulin constant region. The first and second immunoglobulin single variable domains can each have binding specificity for IL-4 or IL-13. Accordingly, this type of ligand can contain two binding sites (be bivalent) wherein each binding site binds IL-4, each binding site binds IL-13 or wherein one binding site binds IL-4 and one binding site binds IL-13. For example, the ligands can have the structure V domain-V domain-IgG constant region or V domain-V domain-IgG Fc portion.

[0186] Generally the orientation of the polypeptide domains that have a binding site with binding specificity for a target and whether the ligand comprises a linker is a matter of design choice. However, some orientations, with or without linkers, may provide better binding characteristics than other orientations. All orientations (e.g., dAb1-linker-dAb2; dAb2-linker-dAb1) are encompassed by the invention, and ligands that contain an orientation that provides desired binding characteristics can be easily identified by screening.

### Half-Life Extended Formats

[0187] The ligand, and dAb monomers disclosed herein, can be formatted to extend its in vivo serum half life. Increased in vivo half-life is useful in in vivo applications of immunoglobulins, especially antibodies and most especially antibody fragments of small size such as dAbs. Such fragments (Fvs, disulphide bonded Fvs, Fabs, scFvs, dAbs) are rapidly cleared from the body, which can limit clinical applications.

[0188] A ligand can be formatted as a larger antigen-binding fragment of an antibody or as an antibody (e.g., formatted as a Fab, Fab′, F(ab)₂, F(ab′)₂, IgG, scFv) that has larger hydrodynamic size. Ligands can also be formatted to have a larger hydrodynamic size, for example, by attachment of a polyalkyleneglycol group (e.g. polyethyleneglycol (PEG) group, polypropylene glycol, polybutylene glycol), serum albumin, transferrin, transferrin receptor or at least the transferrin-binding portion thereof, an antibody Fc region, or by conjugation to an antibody domain. In some embodiments, the ligand (e.g., dAb monomer) is PEGylated. Preferably the PEGylated ligand (e.g., dAb monomer) binds IL-4 and/or IL-13 with substantially the same affinity or avidity as the same ligand that is not PEGylated. For example, the ligand can be a PEGylated ligand comprising a dAb that binds IL-4 or IL-13 with an affinity or avidity that differs from the avidity of ligand in unPEGylated form by no more than a factor of about 1000, preferably no more than a factor of about 100, more preferably no more than a factor of about 10, or with affinity or avidity substantially unchanged relative to the unPEGylated form. See, PCT/GB03/002804, filed Jun. 30, 2003, which designated the United States, (WO 2004/081026) regarding PEGylated single variable domains and dAbs, suitable methods for preparing same, increased in vivo half-life of the PEGylated single variable domains and dAb monomers and multimers, suitable PEGs, preferred hydrodynamic sizes of PEGs, and preferred hydrodynamic sizes of PEGylated single variable domains and dAb monomers and multimers. The entire teaching of PCT/GB03/002804 (WO 2004/081026), including the portions referred to above, are incorporated herein by reference.

[0189] Hydrodynamic size of the ligands (e.g., dAb monomers and multimers) of the invention may be determined using methods which are well known in the art. For example, gel filtration chromatography may be used to determine the hydrodynamic size of a ligand. Suitable gel filtration matrices for determining the hydrodynamic sizes of ligands, such as cross-linked agarose matrices, are well known and readily available.

[0190] The size of a ligand format (e.g., the size of a PEG moiety attached to a dAb monomer), can be varied depending on the desired application. For example, where a ligand is intended to leave the circulation and enter into peripheral tissues, it is desirable to keep the hydrodynamic size of the ligand low to facilitate diffusion from the blood stream. Alternatively, where it is desired to have the ligand remain in the systemic circulation for a longer period of time the size of the ligand can be increased, for example by formatting as an IgG-like protein or by addition of a 30 to 60 kDa PEG moiety (e.g., linear or branched 30 kDa PEG to 40 kDa PEG, such as addition of two 20 kDa PEG moieties.) The size of the ligand format can be tailored to achieve a desired in vivo serum half-life. For example, the size of the ligand format can be tailored to control exposure to a toxin and/or to reduce side effects of toxic agents.

[0191] The hydrodynamic size of a ligand (e.g., dAb monomer) and its serum half-life can also be increased by conjugating or linking the ligand to a binding domain (e.g., antibody or antibody fragment) that binds an antigen or epitope that increases half-life in vivo, as described herein. For example, the ligand (e.g., dAb monomer) can be conjugated or linked to an anti-serum albumin or anti-neonatal Fc receptor antibody or antibody fragment, (e.g., an anti-SA or anti-neonatal Fc receptor dAb, Fab, Fab′ or scFv), or to an anti-SA affibody or anti-neonatal Fc receptor affibody.

[0192] Examples of suitable albumin, albumin fragments or albumin variants for use in a ligand according to the invention are described in WO 2005/077042A2, which is incorporated herein by reference in its entirety. In particular, the following albumin, albumin fragments or albumin variants can be used in the present invention:
[0193] SEQ ID NO:1 (as disclosed in WO 2005/077042A2, this sequence being explicitly incorporated into the present disclosure by reference);
[0194] Albumin fragment or variant comprising or consisting of amino acids 1-387 of SEQ ID NO:1 in WO 2005/077042A2;
[0195] Albumin, or fragment or variant thereof, comprising an amino acid sequence selected from the group consisting of: (a) amino acids 54 to 61 of SEQ ID NO:1 in WO 2005/077042A2; (b) amino acids 76 to 89 of SEQ ID NO:1 in WO 2005/077042A2; (c) amino acids 92 to 100 of SEQ ID NO:1 in WO 2005/077042A2; (d) amino acids 170 to 176 of SEQ ID NO:1 in WO 2005/077042A2; (e) amino acids 247 to 252 of SEQ ID NO:1 in WO 2005/077042A2; (f) amino acids 266 to 277 of SEQ ID NO:1 in WO 2005/077042A2; (g) amino acids 280 to 288 of SEQ ID NO:1 in WO 2005/077042A2; (h) amino acids 362 to 368 of SEQ ID NO:1 in WO 2005/077042A2; (i) amino acids 439 to 447 of SEQ ID NO:1 in WO 2005/077042A2 (j) amino acids 462 to 475 of SEQ ID NO:1 in WO 2005/077042A2; (k) amino acids 478 to 486 of SEQ ID NO:1 in WO 2005/077042A2; and (l) amino acids 560 to 566 of SEQ ID NO:1 in WO 2005/077042A2.

[0196] Further examples of suitable albumin, fragments and analogs for use in a ligand according to the invention are described in WO 03/076567A2, which is incorporated herein by reference in its entirety. In particular, the following albumin, fragments or variants can be used in the present invention:
[0197] Human serum albumin as described in WO 03/076567A2, (e.g., in FIG. 3) (this sequence information being explicitly incorporated into the present disclosure by reference);
[0198] Human serum albumin (HA) consisting of a single non-glycosylated polypeptide chain of 585 amino acids with a formula molecular weight of 66,500 (See, Meloun, et al., FEBS Letters 58:136 (1975); Behrens, et al., Fed. Proc. 34:591 (1975); Lawn, et al., Nucleic Acids Research 9:6102-6114 (1981); Minghetti, et al., J. Biol. Chem. 261:6747 (1986));
[0199] A polymorphic variant or analog or fragment of albumin as described in Weitkamp, et al., Ann. Hum. Genet. 37:219 (1973);
[0200] An albumin fragment or variant as described in EP 322094, (e.g., HA(1-373), HA(1-388), HA(1-389), HA(1-369), and HA(1-419) and fragments between 1-369 and 1-419);
[0201] An albumin fragment or variant as described in EP 399666, (e.g., HA(1-177) and HA(1-200) and fragments between HA(1-X), where X is any number from 178 to 199).

[0202] Where a (one or more) half-life extending moiety (e.g., albumin, transferrin and fragments and analogs thereof) is used in the ligands of the invention, it can be conjugated to the ligand using any suitable method, such as, by direct fusion to the target-binding moiety (e.g., dAb or antibody fragment), for example by using a single nucleotide construct that encodes a fusion protein, wherein the fusion protein is encoded as a single polypeptide chain with the half-life extending moiety located N- or C-terminally to the cell surface target binding moieties. Alternatively, conjugation can be achieved by using a peptide linker between moieties, (e.g., a peptide linker as described in WO 03/076567A2 or WO 2004/003019) (these linker disclosures being incorporated by reference in the present disclosure to provide examples for use in the present invention).

[0203] Typically, a polypeptide that enhances serum half-life in vivo is a polypeptide which occurs naturally in vivo and which resists degradation or removal by endogenous mechanisms which remove unwanted material from the organism (e.g., human). For example, a polypeptide that enhances serum half-life in vivo can be selected from proteins from the extracellular matrix, proteins found in blood, proteins found at the blood brain barrier or in neural tissue, proteins localized to the kidney, liver, lung, heart, skin or bone, stress proteins, disease-specific proteins, or proteins involved in Fc transport.

[0204] Suitable polypeptides that enhance serum half-life in vivo include, for example, transferrin receptor specific ligand-neuropharmaceutical agent fusion proteins (see U.S. Pat. No. 5,977,307, the teachings of which are incorporated herein by reference), brain capillary endothelial cell receptor, transferrin, transferrin receptor (e.g., soluble transferrin receptor), insulin, insulin-like growth factor 1 (IGF 1) receptor, insulin-like growth factor 2 (IGF 2) receptor, insulin receptor, blood coagulation factor X, α1-antitrypsin and HNF 1α. Suitable polypeptides that enhance serum half-life also include alpha-1 glycoprotein (orosomucoid; AAG), alpha-1 antichymotrypsin (ACT), alpha-1 microglobulin (protein HC; AIM), antithrombin III (AT III), apolipoprotein A-1 (Apo A-1), apolipoprotein B (Apo B), ceruloplasmin (Cp), complement component C3 (C3), complement component C4 (C4), C1 esterase inhibitor (C1 INH), C-reactive protein (CRP), ferritin (FER), hemopexin (HPX), lipoprotein(a) (Lp(a)), mannose-binding protein (MBP), myoglobin (Myo), prealbumin (transthyretin; PAL), retinol-binding protein (RBP), and rheumatoid factor (RF).

[0205] Suitable proteins from the extracellular matrix include, for example, collagens, laminins, integrins and fibronectin. Collagens are the major proteins of the extracellular matrix. About 15 types of collagen molecules are currently known, found in different parts of the body, e.g. type I collagen (accounting for 90% of body collagen) found in bone, skin, tendon, ligaments, cornea, internal organs or type II collagen found in cartilage, vertebral disc, notochord, and vitreous humor of the eye.

[0206] Suitable proteins from the blood include, for example, plasma proteins (e.g., fibrin, α-2 macroglobulin, serum albumin, fibrinogen (e.g., fibrinogen A, fibrinogen B), serum amyloid protein A, haptoglobin, profilin, ubiquitin, uteroglobulin and β-2-microglobulin), enzymes and enzyme inhibitors (e.g., plasminogen, lysozyme, cystatin C, alpha-1-antitrypsin and pancreatic trypsin inhibitor), proteins of the immune system, such as immunoglobulin proteins (e.g., IgA, IgD, IgE, IgG, IgM, immunoglobulin light chains (kappa/lambda)), transport proteins (e.g., retinol binding protein, α-1 microglobulin), defensins (e.g., beta-defensin 1, neutrophil defensin 1, neutrophil defensin 2 and neutrophil defensin 3) and the like.

[0207] Suitable proteins found at the blood brain barrier or in neural tissue include, for example, melanocortin receptor, myelin, ascorbate transporter and the like.

[0208] Suitable polypeptides that enhance serum half-life in vivo also include proteins localized to the kidney (e.g., polycystin, type IV collagen, organic anion transporter K1, Heymann's antigen), proteins localized to the liver (e.g., alcohol dehydrogenase, G250), proteins localized to the lung (e.g., secretory component, which binds IgA), proteins localized to the heart (e.g., HSP 27, which is associated with dilated cardiomyopathy), proteins localized to the skin (e.g., keratin), bone specific proteins such as morphogenic proteins (BMPs), which are a subset of the transforming growth factor β superfamily of proteins that demonstrate osteogenic activity (e.g., BMP-2, BMP-4, BMP-5, BMP-6, BMP-7, BMP-8), tumor specific proteins (e.g., trophoblast antigen, herceptin receptor, oestrogen receptor, cathepsins (e.g., cathepsin B, which can be found in liver and spleen)).

[0209] Suitable disease-specific proteins include, for example, antigens expressed only on activated T-cells, including LAG-3 (lymphocyte activation gene), osteoprotegerin ligand (OPGL; see Nature 402, 304-309 (1999)), OX40 (a member of the TNF receptor family, expressed on activated T cells and specifically up-regulated in human T cell leukemia virus type-I (HTLV-I)-producing cells; see Immunol. 165 (1):263-70 (2000)). Suitable disease-specific proteins also include, for example, metalloproteases (associated with arthritis/cancers) including CG6512 Drosophila, human paraplegin, human FtsH, human AFG3L2, murine ftsH; and angiogenic growth factors, including acidic fibroblast growth factor (FGF-1), basic fibroblast growth factor (FGF-2), vascular endothelial growth factor/vascular permeability factor (VEGF/VPF), transforming growth factor-alpha (TGF-α), tumor necrosis factor-alpha (TNF-α), angiogenin, interleukin-3 (IL-3), interleukin-8 (IL-8), platelet-derived endothelial growth factor (PD-ECGF), placental growth factor (P1GF), midkine platelet-derived growth factor-BB (PDGF), and fractalkine.

[0210] Suitable polypeptides that enhance serum half-life in vivo also include stress proteins such as heat shock proteins (HSPs). HSPs are normally found intracellularly. When they are found extracellularly, it is an indicator that a cell has died and spilled out its contents. This unprogrammed cell death (necrosis) occurs when as a result of trauma, disease or injury, extracellular HSPs trigger a response from the immune system. Binding to extracellular HSP can result in localizing the compositions of the invention to a disease site.

[0211] Suitable proteins involved in Fc transport include, for example, Brambell receptor (also known as FcRB). This Fc receptor has two functions, both of which are potentially useful for delivery. The functions are (1) transport of IgG from mother to child across the placenta (2) protection of IgG from degradation thereby prolonging its serum half-life. It is thought that the receptor recycles IgG from endosomes. (See, Holliger et al, Nat Biotechnol 15(7):632-6 (1997).)

[0212] Methods for pharmacokinetic analysis and determination of ligand half-life will be familiar to those skilled in the art. Details may be found in Kenneth, A. et al: Chemical Stability of Pharmaceuticals: A Handbook for Pharmacists and in Peters et al, Pharmacokinetic Analysis: A Practical Approach (1996). Reference is also made to “Pharmacokinetics”, M Gibaldi & D Perron, published by Marcel Dekker, 2 Rev. ex edition (1982), which describes pharmacokinetic parameters such as t alpha and t beta half lives and area under the curve (AUC).

Ligands that Contain a Toxin Moiety or Toxin

[0213] The invention also relates to ligands that comprise a toxin moiety or toxin. Suitable toxin moieties comprise a toxin (e.g., surface active toxin, cytotoxin). The toxin moiety or toxin can be linked or conjugated to the ligand using any suitable method. For example, the toxin moiety or toxin can be covalently bonded to the ligand directly or through a suitable linker. Suitable linkers can include noncleavable or cleavable linkers, for example, pH cleavable linkers that comprise a cleavage site for a cellular enzyme (e.g., cellular esterases, cellular proteases such as cathepsin B). Such cleavable linkers can be used to prepare a ligand that can release a toxin moiety or toxin after the ligand is internalized.

[0214] A variety of methods for linking or conjugating a toxin moiety or toxin to a ligand can be used. The particular method selected will depend on the toxin moiety or toxin and ligand to be linked or conjugated. If desired, linkers that contain terminal functional groups can be used to link the ligand and toxin moiety or toxin. Generally, conjugation is accomplished by reacting toxin moiety or toxin that contains a reactive functional group (or is modified to contain a reactive functional group) with a linker or directly with a ligand. Covalent bonds formed by reacting a toxin moiety or toxin that contains (or is modified to contain) a chemical moiety or functional group that can, under appropriate conditions, react with a second chemical group thereby forming a covalent bond. If desired, a suitable reactive chemical group can be added to ligand or to a linker using any suitable method. (See, e.g., Hermanson, G. T., Bioconjugate Techniques, Academic Press: San Diego, Calif. (1996).) Many suitable reactive chemical group combinations are known in the art, for example an amine group can react with an electrophilic group such as tosylate, mesylate, halo (chloro, bromo, fluoro, iodo), N-hydroxysuccinimidyl ester (NHS), and the like. Thiols can react with maleimide, iodoacetyl, acrylolyl, pyridyl disulfides, 5-thiol-2-nitrobenzoic acid thiol (TNB-thiol), and the like. An aldehyde functional group can be coupled to amine- or hydrazide-containing molecules, and an azide group can react with a trivalent phosphorous group to form phosphoramidate or phosphorimide linkages. Suitable methods to introduce activating groups into molecules are known in the art (see for example, Hermanson, G. T., Bioconjugate Techniques, Academic Press: San Diego, Calif. (1996)).

[0215] Suitable toxin moieties and toxins include, for example, a maytansinoid (e.g., maytansinol, e.g., DM1, DM4), a taxane, a calicheamicin, a duocarmycin, or derivatives thereof. The maytansinoid can be, for example, maytansinol or a maytansinol analogue. Examples of maytansinol analogs include those having a modified aromatic ring (e.g., C-19-decloro, C-20-demethoxy, C-20-acyloxy) and those having modifications at other positions (e.g., C-9-CH, C-14-alkoxymethyl, C-14-hydroxymethyl or aceloxymethyl, C-15-hydroxy/acyloxy, C-15-methoxy, C-18-N-demethyl, 4,5-deoxy). Maytansinol and maytansinol analogs are described, for example, in U.S. Pat. Nos. 5,208,020 and 6,333,410, the contents of which are incorporated herein by reference. Maytansinol can be coupled to antibodies and antibody fragments using, e.g., an N-succinimidyl 3-(2-pyridyldithio)proprionate (also known as N-succinimidyl 4-(2-pyridyldithio)pentanoate (or SPP), 4-succinimidyl-oxycarbonyl-a-(2-pyridyldithio)-toluene (SMPT), N-succinimidyl-3-(2-pyridyldithio)butyrate (SDPB), 2 iminothiolane, or S-acetylsuccinic anhydride. The taxane can be, for example, a taxol, taxotere, or novel taxane (see, e.g., WO 01/38318). The calicheamicin can be, for example, a bromo-complex calicheamicin (e.g., an alpha, beta or gamma bromo-complex), an iodo-complex calicheamicin (e.g., an alpha, beta or gamma iodo-complex), or analogs and mimics thereof. Bromo-complex calicheamicins include I1-BR, I2-BR, I3-BR, I4-BR, J1-BR, J2-BR and K1-BR. Iodo-complex calicheamicins include I1-I, I2-I, I3-I, J1-I, J2-I, L1-I and K1-BR. Calicheamicin and mutants, analogs and mimics thereof are described, for example, in U.S. Pat. Nos. 4,970,198; 5,264,586; 5,550,246; 5,712,374, and 5,714,586, the contents of each of which are incorporated herein by reference. Duocarmycin analogs (e.g., KW-2189, DC88, DC89 CBI-TMI, and derivatives thereof are described, for example, in U.S. Pat. No. 5,070,092, U.S. Pat. No. 5,187,186, U.S. Pat. No. 5,641,780, U.S. Pat. No. 5,641,780, U.S. Pat. No. 4,923,990, and U.S. Pat. No. 5,101,038, the contents of each of which are incorporated herein by reference.

[0216] Examples of other toxins include, but are not limited to antimetabolites (e.g., methotrexate, 6-mercaptopurine, 6-thioguanine, cytarabine, 5-fluorouracil decarbazine), alkylating agents (e.g., mechlorethamine, thioepa chlorambucil, CC-1065 (see U.S. Pat. Nos. 5,475,092, 5,585,499, 5,846,545), melphalan, carmustine (BSNU) and lomustine (CCNU), cyclophosphamide, busulfan, dibromomannitol, streptozotocin, mitomycin C, and cis-dichlorodiamine platinum (II) (DDP) cisplatin), anthracyclines (e.g., daunorubicin (formerly daunomycin) and doxorubicin), antibiotics (e.g., dactinomycin (formerly actinomycin), bleomycin, mithramycin, mitomycin, puromycin anthramycin (AMC)), duocarmycin and analogs or derivatives thereof, and anti-mitotic agents (e.g., vincristine, vinblastine, taxol, auristatins (e.g., auristatin E) and maytansinoids, and analogs or homologs thereof.

[0217] The toxin can also be a surface active toxin, such as a toxin that is a free radical generator (e.g. selenium containing toxin moieties), or radionuclide containing moiety. Suitable radionuclide containing moieties, include for example, moieties that contain radioactive iodine (¹³¹I or ¹²⁵I), yttrium (⁹⁰Y), lutetium (¹⁷⁷Lu), actinium (²²⁵Ac), praseodymium, astatine (²¹¹At), rhenium (¹⁸⁶Re), bismuth (²¹²Bi or ²¹³Bi), indium (¹¹¹In), technetium (⁹⁹mTc), phosphorus (³²P), rhodium (¹⁸⁸Rh), sulfur (³⁵S), carbon (¹⁴C), tritium (³H), chromium (⁵¹Cr), chlorine (³⁶Cl), cobalt (⁵⁷Co or ⁵⁸Co), iron (⁵⁹Fe), selenium (⁷⁵Se), or gallium (⁶⁷Ga).

[0218] The toxin can be a protein, polypeptide or peptide, from bacterial sources, e.g., diphtheria toxin, pseudomonas exotoxin (PE) and plant proteins, e.g., the A chain of ricin (RTA), the ribosome inactivating proteins (RIPs) gelonin, pokeweed antiviral protein, saporin, and dodecandron are contemplated for use as toxins.

[0219] Antisense compounds of nucleic acids designed to bind, disable, promote degradation or prevent the production of the mRNA responsible for generating a particular target protein can also be used as a toxin. Antisense compounds include antisense RNA or DNA, single or double stranded, oligonucleotides, or their analogs, which can hybridize specifically to individual mRNA species and prevent transcription and/or RNA processing of the mRNA species and/or translation of the encoded polypeptide and thereby effect a reduction in the amount of the respective encoded polypeptide. Ching, et al., Proc. Natl. Acad. Sci. U.S.A. 86: 10006-10010 (1989); Broder, et al., Ann. Int. Med. 113: 604-618 (1990); Loreau, et al., FEBS Letters 274: 53-56 (1990); Useful antisense therapeutics include for example: Veglin™ (VasGene) and OGX-011 (Oncogenix).

[0220] Toxins can also be photoactive agents. Suitable photoactive agents include porphyrin-based materials such as porfimer sodium, the green porphyrins, chlorin E6, hematoporphyrin derivative itself, phthalocyanines, etiopurpurins, texaphrin, and the like.

[0221] The toxin can be an antibody or antibody fragment that binds an intracellular target, such as a dAb that binds an intracellular target (an intrabody). Such antibodies or antibody fragments (dAbs) can be directed to defined subcellular compartments or targets. For example, the antibodies or antibody fragments (dAbs) can bind an intracellular target selected from erbB2, EGFR, BCR-ABL, p21Ras, Caspase3, Caspase7, Bcl-2, p53, Cyclin E, ATF-1/CREB, HPV16 E7, HP1, Type IV collagenases, cathepsin L as well as others described in Kontermann, R. E., Methods, 34:163-170 (2004), incorporated herein by reference in its entirety.

Polypeptide Domains that Bind IL-4

[0222] The invention provides polypeptide domains (e.g., immunoglobulin single variable domains, dAb monomers) that have a binding site with binding specificity for IL-4. In preferred embodiments, the polypeptide domain (e.g., dAb) binds to IL-4 with an affinity (KD; KD=K_{off}(kd)/Kₒₙ(ka)) of 300 nM to 1 pM (i.e., 3×10⁻⁷ to 5×10⁻¹²M), preferably 50 nM to 1 pM, more preferably 5 nM to 1 μM and most preferably 1 nM to 1 pM, for example a K_{D} of 1×10⁻⁷ M or less, preferably 1×10⁻⁸ M or less, more preferably 1×10⁻⁹ M or less, advantageously 1×10⁻¹⁰ M or less and most preferably 1×10⁻¹¹ M or less; and/or a K_{off} rate constant of 5×10⁻¹ s⁻¹ to 1×10⁻⁷ s⁻¹, preferably 1×10⁻² s⁻¹ to 1×10⁻⁶ s⁻¹, more preferably 5×10⁻³ s⁻¹ to 1×10⁻⁵ s⁻¹, for example 5×10⁻¹ s⁻¹ or less, preferably 1×10⁻² s⁻¹ or less, advantageously 1×10⁻³ s⁻¹ or less, more preferably 1×10⁻⁴ s⁻¹ or less, still more preferably 1×10⁻⁵ s⁻¹ or less, and most preferably 1×10⁻⁶ s⁻¹ or less as determined by surface plasmon resonance.

[0223] In some embodiments, the polypeptide domain that has a binding site with binding specificity for IL-4 competes for binding to IL-4 with a dAb selected from the group consisting of DOM9-15 (SEQ ID NO:175), DOM9-17 (SEQ ID NO:176), DOM9-23 (SEQ ID NO:177), DOM9-24 (SEQ ID NO:178), DOM9-25 (SEQ ID NO:179), DOM9-27 (SEQ ID NO:180), DOM9-28 (SEQ ID NO:181), DOM9-29 (SEQ ID NO:182), DOM9-30 (SEQ ID NO:183), DOM9-31 (SEQ ID NO:184), DOM9-32 (SEQ ID NO:185), DOM9-33 (SEQ ID NO:186), DOM9-50 (SEQ ID NO:187), DOM9-57 (SEQ ID NO:188), DOM9-59 (SEQ ID NO:189), DOM9-63 (SEQ ID NO:190), DOM9-67 (SEQ ID NO:191), DOM9-68 (SEQ ID NO:192), DOM9-70 (SEQ ID NO:193), DOM9-79 (SEQ ID NO:194), DOM9-82 (SEQ ID NO:195), DOM9-86 (SEQ ID NO:196), DOM9-94 (SEQ ID NO:197), DOM9-108 (SEQ ID NO:198), DOM9-112 (SEQ ID NO:199), DOM9-112-1 (SEQ ID NO:200), DOM9-112-2 (SEQ ID NO:201), DOM9-112-3 (SEQ ID NO:202), DOM9-112-4 (SEQ ID NO:203), DOM9-112-5 (SEQ ID NO:204), DOM9-112-6 (SEQ ID NO:205), DOM9-112-7 (SEQ ID NO:206), DOM9-112-8 (SEQ ID NO:207), DOM9-112-9 (SEQ ID NO:208), DOM9-112-10 (SEQ ID NO:209), DOM9-112-11 (SEQ ID NO:210), DOM9-112-12 (SEQ ID NO:211), DOM9-112-13 (SEQ ID NO:212), DOM9-112-14 (SEQ ID NO:213), DOM9-112-15 (SEQ ID NO:214), DOM9-112-16 (SEQ ID NO:215), DOM9-112-17 (SEQ ID NO:216), DOM9-112-18 (SEQ ID NO:217), DOM9-112-19 (SEQ ID NO:218), DOM9-112-20 (SEQ ID NO:219), DOM9-112-21 (SEQ ID NO:220), DOM9-112-22 (SEQ ID NO:221), DOM9-112-23 (SEQ ID NO:222), DOM9-112-25 (SEQ ID NO:223), DOM9-112-81 (SEQ ID NO:224), DOM9-112-82 (SEQ ID NO:225), DOM9-112-83 (SEQ ID NO:226), DOM9-112-84 (SEQ ID NO:227), DOM9-112-85 (SEQ ID NO:228), DOM9-112-86 (SEQ ID NO:229), DOM9-112-87 (SEQ ID NO:230), DOM9-112-88 (SEQ ID NO:231), DOM9-112-89 (SEQ ID NO:232), DOM9-112-90 (SEQ ID NO:233), DOM9-112-91 (SEQ ID NO:234), DOM9-112-92 (SEQ ID NO:235), DOM9-112-93 (SEQ ID NO:236), DOM9-112-94 (SEQ ID NO:237), DOM9-112-95 (SEQ ID NO:238), DOM9-112-96 (SEQ ID NO:239), DOM9-112-97 (SEQ ID NO:240), DOM9-112-98 (SEQ ID NO:241), DOM9-112-99 (SEQ ID NO:242), DOM9-112-100 (SEQ ID NO:243), DOM9-112-101 (SEQ ID NO:244), DOM9-1132-102 (SEQ ID NO:245), DOM9-112-103 (SEQ ID NO:246), DOM9-112-104 (SEQ ID NO:247), DOM9-112-105 (SEQ ID NO:248), DOM9-112-106 (SEQ ID NO:249), DOM9-112-107 (SEQ ID NO:250), DOM9-112-108 (SEQ ID NO:251), DOM9-112-109 (SEQ ID NO:252), DOM9-112-110 (SEQ ID NO:253), DOM9-112-111 (SEQ ID NO:254), DOM9-112-112 (SEQ ID NO:255), DOM9-112-113 (SEQ ID NO:256), DOM9-112-114 (SEQ ID NO:257), DOM9-112-115 (SEQ ID NO:258), DOM9-112-116 (SEQ ID NO:259), DOM9-112-117 (SEQ ID NO:260), DOM9-112-118 (SEQ ID NO:261), DOM9-112-119 (SEQ ID NO:262), DOM9-112-120 (SEQ ID NO:263), DOM9-112-121 (SEQ ID NO:264), DOM9-112-122 (SEQ ID NO:265), DOM9-112-123 (SEQ ID NO:266), DOM9-112-124 (SEQ ID NO:267), DOM9-112-125 (SEQ ID NO:268), DOM9-112-126 (SEQ ID NO:269), DOM9-112-127 (SEQ ID NO:270), DOM9-112-128 (SEQ ID NO:271), DOM9-112-134 (SEQ ID NO:272), DOM9-112-135 (SEQ ID NO:273), DOM9-112-136 (SEQ ID NO:274), DOM9-112-137 (SEQ ID NO:275), DOM9-112-138 (SEQ ID NO:276), DOM9-112-140 (SEQ ID NO:277), DOM9-112-141 (SEQ ID NO:278), DOM9-112-142 (SEQ ID NO:279), DOM9-112-143 (SEQ ID NO:280), DOM9-112-144 (SEQ ID NO:281), DOM9-112-145 (SEQ ID NO:282), DOM9-112-146 (SEQ ID NO:283), DOM9-112-147 (SEQ ID NO:284), DOM9-112-148 (SEQ ID NO:285), DOM9-112-149 (SEQ ID NO:286), DOM9-112-150 (SEQ ID NO:287), DOM9-112-151 (SEQ ID NO:288), DOM9-112-152 (SEQ ID NO:289), DOM9-112-153 (SEQ ID NO:290), DOM9-112-154 (SEQ ID NO:291), DOM9-112-155 (SEQ ID NO:292), DOM9-112-156 (SEQ ID NO:293), DOM9-112-157 (SEQ ID NO:294), DOM9-112-158 (SEQ ID NO:295), DOM9-112-159 (SEQ ID NO:296), DOM9-112-160 (SEQ ID NO:297), DOM9-112-161 (SEQ ID NO:298), DOM9-112-162 (SEQ ID NO:299), DOM9-112-163 (SEQ ID NO:300), DOM9-112-164 (SEQ ID NO:301), DOM9-112-165 (SEQ ID NO:302), DOM9-112-166 (SEQ ID NO:303), DOM9-112-167 (SEQ ID NO:304), DOM9-112-168 (SEQ ID NO:305), DOM9-112-169 (SEQ ID NO:306), DOM9-112-170 (SEQ ID NO:307), DOM9-112-171 (SEQ ID NO:308), DOM9-112-172 (SEQ ID NO:309), DOM9-112-173 (SEQ ID NO:310), DOM9-112-174 (SEQ ID NO:311), DOM9-112-175 (SEQ ID NO:312), DOM9-112-176 (SEQ ID NO:313), DOM9-112-177 (SEQ ID NO:314), DOM9-112-178 (SEQ ID NO:315), DOM9-112-179 (SEQ ID NO:316), DOM9-112-180 (SEQ ID NO:317), DOM9-112-181 (SEQ ID NO:318), DOM9-112-182 (SEQ ID NO:319), DOM9-112-183 (SEQ ID NO:320), DOM9-112-184 (SEQ ID NO:321), DOM9-112-185 (SEQ ID NO:322), DOM9-112-186 (SEQ ID NO:323), DOM9-112-187 (SEQ ID NO:324), DOM9-112-188 (SEQ ID NO:325), DOM9-112-189 (SEQ ID NO:326), DOM9-112-190 (SEQ ID NO:327), DOM9-112-191 (SEQ ID NO:328), DOM9-112-192 (SEQ ID NO:329), DOM9-112-193 (SEQ ID NO:330), DOM9-112-194 (SEQ ID NO:331), DOM9-112-195 (SEQ ID NO:332), DOM9-112-196 (SEQ ID NO:333), DOM9-112-197 (SEQ ID NO:334), DOM9-112-198 (SEQ ID NO:335), DOM9-112-199 (SEQ ID NO:336), DOM9-112-200 (SEQ ID NO:337), DOM9-112-201 (SEQ ID NO:338), DOM9-112-202 (SEQ ID NO:339), DOM9-120 (SEQ ID NO:340), DOM9-121 (SEQ ID NO:341), DOM9-122 (SEQ ID NO:342), DOM9-123 (SEQ ID NO:343), DOM9-124 (SEQ ID NO:344), DOM9-125 (SEQ ID NO:345), DOM9-128 (SEQ ID NO:346), DOM9-134 (SEQ ID NO:347), DOM9-136 (SEQ ID NO:348), DOM9-26 (SEQ ID NO:500), DOM9-35 (SEQ ID NO:501), DOM9-36 (SEQ ID NO:502), DOM9-37 (SEQ ID NO:503), DOM9-38 (SEQ ID NO:504), DOM9-39 (SEQ ID NO:505), DOM9-40 (SEQ ID NO:506), DOM9-41 (SEQ ID NO:507), DOM9-43 (SEQ ID NO:508), DOM9-44 (SEQ ID NO:509), DOM9-44-500 (SEQ ID NO:510), DOM9-44-501 (SEQ ID NO:511), DOM9-44-502 (SEQ ID NO:512), DOM9-44-503 (SEQ ID NO:513), DOM9-44-504 (SEQ ID NO:514), DOM9-44-505 (SEQ ID NO:515), DOM9-44-506 (SEQ ID NO:516), DOM9-44-507 (SEQ ID NO:517), DOM9-44-509 (SEQ ID NO:518), DOM9-44-510 (SEQ ID NO:519), DOM9-44-511 (SEQ ID NO:520), DOM9-44-512 (SEQ ID NO:521), DOM9-44-513 (SEQ ID NO:522), DOM9-44-514 (SEQ ID NO:523), DOM9-44-515 (SEQ ID NO:524), DOM9-44-516 (SEQ ID NO:525), DOM9-44-517 (SEQ ID NO:526), DOM9-44-518 (SEQ ID NO:527), DOM9-44-519 (SEQ ID NO:528), DOM9-44-520 (SEQ ID NO:529), DOM9-44-521 (SEQ ID NO:530), DOM9-44-522 (SEQ ID NO:531), DOM9-44-523 (SEQ ID NO:532), DOM9-44-524 (SEQ ID NO:533), DOM9-44-525 (SEQ ID NO:534), DOM9-44-526 (SEQ ID NO:535), DOM9-44-527 (SEQ ID NO:536), DOM9-44-528 (SEQ ID NO:537), DOM9-44-529 (SEQ ID NO:538), DOM9-44-530 (SEQ ID NO:539), DOM9-44-531 (SEQ ID NO:540), DOM9-44-532 (SEQ ID NO:541), DOM9-44-533 (SEQ ID NO:542), DOM9-44-534 (SEQ ID NO:543), DOM9-44-535 (SEQ ID NO:544), DOM9-44-536 (SEQ ID NO:545), DOM9-44-537 (SEQ ID NO:546), DOM9-44-538 (SEQ ID NO:547), DOM9-44-539 (SEQ ID NO:548), DOM9-44-540 (SEQ ID NO:549), DOM9-44-541 (SEQ ID NO:550), DOM9-44-542 (SEQ ID NO:551), DOM9-44-543 (SEQ ID NO:552), DOM9-44-544 (SEQ ID NO:553), DOM9-44-545 (SEQ ID NO:554), DOM9-44-546 (SEQ ID NO:555), DOM9-44-547 (SEQ ID NO:556), DOM9-44-548 (SEQ ID NO:557), DOM9-44-549 (SEQ ID NO:558), DOM9-44-550 (SEQ ID NO:559), DOM9-44-551 (SEQ ID NO:560), DOM9-44-552 (SEQ ID NO:561), DOM9-44-553 (SEQ ID NO:562), DOM9-44-554 (SEQ ID NO:563), DOM9-44-555 (SEQ ID NO:564), DOM9-44-556 (SEQ ID NO:565), DOM9-44-557 (SEQ ID NO:566), DOM9-44-558 (SEQ ID NO:567), DOM9-44-559 (SEQ ID NO:568), DOM9-44-560 (SEQ ID NO:569), DOM9-44-561 (SEQ ID NO:570), DOM9-44-562 (SEQ ID NO:571), DOM9-44-563 (SEQ ID NO:572), DOM9-44-564 (SEQ ID NO:573), DOM9-44-565 (SEQ ID NO:574), DOM9-44-566 (SEQ ID NO:575), DOM9-44-625 (SEQ ID NO:576), DOM9-44-626 (SEQ ID NO:577), DOM9-44-627 (SEQ ID NO:578), DOM9-44-628 (SEQ ID NO:579), DOM9-44-629 (SEQ ID NO:580), DOM9-44-630 (SEQ ID NO:581), DOM9-44-631 (SEQ ID NO:582), DOM9-44-632 (SEQ ID NO:583), DOM9-44-633 (SEQ ID NO:584), DOM9-44-634 (SEQ ID NO:585), DOM9-44-636 (SEQ ID NO:586), DOM9-44-637 (SEQ ID NO:587), DOM9-44-639 (SEQ ID NO:588), DOM9-44-640 (SEQ ID NO:589), DOM9-44-641 (SEQ ID NO:590), DOM9-44-642 (SEQ ID NO:591), DOM9-44-643 (SEQ ID NO:592), DOM9-44-644 (SEQ ID NO:593), DOM9-45 (SEQ ID NO:594), DOM9-46 (SEQ ID NO:595), DOM9-47 (SEQ ID NO:596), DOM9-48 (SEQ ID NO:597), DOM9-143 (SEQ ID NO:598), DOM9-144 (SEQ ID NO:599), DOM9-146 (SEQ ID NO:600), DOM9-152 (SEQ ID NO:601), DOM9-155 (SEQ ID NO:602), DOM9-155-001 (SEQ ID NO:603), DOM9-155-3 (SEQ ID NO:604), DOM9-155-5 (SEQ ID NO:605), DOM9-155-8 (SEQ ID NO:606), DOM9-155-9 (SEQ ID NO:607), DOM9-155-11 (SEQ ID NO:608), DOM9-155-13 (SEQ ID NO:609), DOM9-155-14 (SEQ ID NO:610), DOM9-155-17 (SEQ ID NO:611), DOM9-155-19 (SEQ ID NO:612), DOM9-155-20 (SEQ ID NO:613), DOM9-155-22 (SEQ ID NO:614), DOM9-155-23 (SEQ ID NO:615), DOM9-155-24 (SEQ ID NO:616), DOM9-155-25 (SEQ ID NO:617), DOM9-155-26 (SEQ ID NO:618), DOM9-155-27 (SEQ ID NO:619), DOM9-155-28 (SEQ ID NO:620), DOM9-155-29 (SEQ ID NO:621), DOM9-155-30 (SEQ ID NO:622), DOM9-155-31 (SEQ ID NO:623), DOM9-155-32 (SEQ ID NO:624), DOM9-155-33 (SEQ ID NO:625), DOM9-155-34 (SEQ ID NO:626), DOM9-155-35 (SEQ ID NO:627), DOM9-155-36 (SEQ ID NO:628), DOM9-155-37 (SEQ ID NO:629), DOM9-155-38 (SEQ ID NO:630), DOM9-155-39 (SEQ ID NO:631), DOM9-155-41 (SEQ ID NO:632), DOM9-155-42 (SEQ ID NO:633), DOM9-155-43 (SEQ ID NO:634), DOM9-155-44 (SEQ ID NO:635), DOM9-155-45 (SEQ ID NO:636), DOM9-155-46 (SEQ ID NO:637), DOM9-155-47 (SEQ ID NO:638), DOM9-155-48 (SEQ ID NO:639), DOM9-155-49 (SEQ ID NO:640), DOM9-155-50 (SEQ ID NO:641), DOM9-155-51 (SEQ ID NO:642), DOM9-155-52 (SEQ ID NO:643), DOM9-155-53 (SEQ ID NO:644), DOM9-158 (SEQ ID NO:645), DOM9-160 (SEQ ID NO:646), DOM9-161 (SEQ ID NO:647), DOM9-162 (SEQ ID NO:648), DOM9-163 (SEQ ID NO:649) and DOM9-164 (SEQ ID NO:650).

[0224] In some embodiments, the polypeptide domain that has a binding site with binding specificity for IL-4 competes for binding to IL-4 with a dAb selected from the group consisting of DOM9-155-77 (SEQ ID NO:2426), DOM9-155-78 (SEQ ID NO:2427), DOM9-112-204 (SEQ ID NO:2428), DOM9-112-205 (SEQ ID NO:2429), DOM9-112-206 (SEQ ID NO:2430), DOM9-112-207 (SEQ ID NO:2431), DOM9-112-208 (SEQ ID NO:2432), DOM9-112-209 (SEQ ID NO:2433), DOM9-112-210 (SEQ ID NO:2434), DOM9-112-211 (SEQ ID NO:2435), DOM9-112-212 (SEQ ID NO:2436), DOM9-112-213 (SEQ ID NO:2437), DOM9-112-214 (SEQ ID NO:2438), DOM9-112-215 (SEQ ID NO:2439), DOM9-112-216 (SEQ ID NO:2440), DOM9-112-217 (SEQ ID NO:2441), DOM9-112-218 (SEQ ID NO:2442), DOM9-112-219 (SEQ ID NO:2443), DOM9-112-220 (SEQ ID NO:2444), DOM9-112-221 (SEQ ID NO:2445), DOM9-112-222 (SEQ ID NO:2446), DOM9-112-223 (SEQ ID NO:2447), DOM9-112-224 (SEQ ID NO:2448), DOM9-112-225 (SEQ ID NO:2449), DOM9-112-226 (SEQ ID NO:2450), DOM9-112-227 (SEQ ID NO:2451), DOM9-112-228 (SEQ ID NO:2452), DOM9-112-229 (SEQ ID NO:2453), DOM9-112-230 (SEQ ID NO:2454), DOM9-112-231 (SEQ ID NO:2455), DOM9-112-233 (SEQ ID NO:1734), DOM9-112-232 (SEQ ID NO:1733) and DOM9-112-234 (SEQ ID NO:1735).

[0225] In some embodiments, the polypeptide domain that has a binding site with binding specificity for IL-4 (e.g. a dAb) comprises an amino acid sequence that has at least about 80%, at least about 85%, at least about 90%, at least about 91%, at least about 92%, at least about 93%, at least about 94%, at least about 95%, at least about 96%, at least about 97%, at least about 98%, or at least about 99% amino acid sequence identity with the amino acid sequence or a dAb selected from the group consisting of DOM9-15 (SEQ ID NO:175), DOM9-17 (SEQ ID NO:176), DOM9-23 (SEQ ID NO:177), DOM9-24 (SEQ ID NO:178), DOM9-25 (SEQ ID NO:179), DOM9-27 (SEQ ID NO:180), DOM9-28 (SEQ ID NO:181), DOM9-29 (SEQ ID NO:182), DOM9-30 (SEQ ID NO:183), DOM9-31 (SEQ ID NO:184), DOM9-32 (SEQ ID NO:185), DOM9-33 (SEQ ID NO:186), DOM9-50 (SEQ ID NO:187), DOM9-57 (SEQ ID NO:188), DOM9-59 (SEQ ID NO:189), DOM9-63 (SEQ ID NO:190), DOM9-67 (SEQ ID NO:191), DOM9-68 (SEQ ID NO:192), DOM9-70 (SEQ ID NO:193), DOM9-79 (SEQ ID NO:194), DOM9-82 (SEQ ID NO:195), DOM9-86 (SEQ ID NO:196), DOM9-94 (SEQ ID NO:197), DOM9-108 (SEQ ID NO:198), DOM9-112 (SEQ ID NO:199), DOM9-112-1 (SEQ ID NO:200), DOM9-112-2 (SEQ ID NO:201), DOM9-112-3 (SEQ ID NO:202), DOM9-112-4 (SEQ ID NO:203), DOM9-112-5 (SEQ ID NO:204), DOM9-112-6 (SEQ ID NO:205), DOM9-112-7 (SEQ ID NO:206), DOM9-112-8 (SEQ ID NO:207), DOM9-112-9 (SEQ ID NO:208), DOM9-112-10 (SEQ ID NO:209), DOM9-112-11 (SEQ ID NO:210), DOM9-112-12 (SEQ ID NO:211), DOM9-112-13 (SEQ ID NO:212), DOM9-112-14 (SEQ ID NO:213), DOM9-112-15 (SEQ ID NO:214), DOM9-112-16 (SEQ ID NO:215), DOM9-112-17 (SEQ ID NO:216), DOM9-112-18 (SEQ ID NO:217), DOM9-112-19 (SEQ ID NO:218), DOM9-112-20 (SEQ ID NO:219), DOM9-112-21 (SEQ ID NO:220), DOM9-112-22 (SEQ ID NO:221), DOM9-112-23 (SEQ ID NO:222), DOM9-112-25 (SEQ ID NO:223), DOM9-112-81 (SEQ ID NO:224), DOM9-112-82 (SEQ ID NO:225), DOM9-112-83 (SEQ ID NO:226), DOM9-112-84 (SEQ ID NO:227), DOM9-112-85 (SEQ ID NO:228), DOM9-112-86 (SEQ ID NO:229), DOM9-112-87 (SEQ ID NO:230), DOM9-112-88 (SEQ ID NO:231), DOM9-112-89 (SEQ ID NO:232), DOM9-112-90 (SEQ ID NO:233), DOM9-112-91 (SEQ ID NO:234), DOM9-112-92 (SEQ ID NO:235), DOM9-112-93 (SEQ ID NO:236), DOM9-112-94 (SEQ ID NO:237), DOM9-112-95 (SEQ ID NO:238), DOM9-112-96 (SEQ ID NO:239), DOM9-112-97 (SEQ ID NO:240), DOM9-112-98 (SEQ ID NO:241), DOM9-112-99 (SEQ ID NO:242), DOM9-112-100 (SEQ ID NO:243), DOM9-112-101 (SEQ ID NO:244), DOM9-1132-102 (SEQ ID NO:245), DOM9-112-103 (SEQ ID NO:246), DOM9-112-104 (SEQ ID NO:247), DOM9-112-105 (SEQ ID NO:248), DOM9-112-106 (SEQ ID NO:249), DOM9-112-107 (SEQ ID NO:250), DOM9-112-108 (SEQ ID NO:251), DOM9-112-109 (SEQ ID NO:252), DOM9-112-110 (SEQ ID NO:253), DOM9-112-111 (SEQ ID NO:254), DOM9-112-112 (SEQ ID NO:255), DOM9-112-113 (SEQ ID NO:256), DOM9-112-114 (SEQ ID NO:257), DOM9-112-115 (SEQ ID NO:258), DOM9-112-116 (SEQ ID NO:259), DOM9-112-117 (SEQ ID NO:260), DOM9-112-118 (SEQ ID NO:261), DOM9-112-119 (SEQ ID NO:262), DOM9-112-120 (SEQ ID NO:263), DOM9-112-121 (SEQ ID NO:264), DOM9-112-122 (SEQ ID NO:265), DOM9-112-123 (SEQ ID NO:266), DOM9-112-124 (SEQ ID NO:267), DOM9-112-125 (SEQ ID NO:268), DOM9-112-126 (SEQ ID NO:269), DOM9-112-127 (SEQ ID NO:270), DOM9-112-128 (SEQ ID NO:271), DOM9-112-134 (SEQ ID NO:272), DOM9-112-135 (SEQ ID NO:273), DOM9-112-136 (SEQ ID NO:274), DOM9-112-137 (SEQ ID NO:275), DOM9-112-138 (SEQ ID NO:276), DOM9-112-140 (SEQ ID NO:277), DOM9-112-141 (SEQ ID NO:278), DOM9-112-142 (SEQ ID NO:279), DOM9-112-143 (SEQ ID NO:280), DOM9-112-144 (SEQ ID NO:281), DOM9-112-145 (SEQ ID NO:282), DOM9-112-146 (SEQ ID NO:283), DOM9-112-147 (SEQ ID NO:284), DOM9-112-148 (SEQ ID NO:285), DOM9-112-149 (SEQ ID NO:286), DOM9-112-150 (SEQ ID NO:287), DOM9-112-151 (SEQ ID NO:288), DOM9-112-152 (SEQ ID NO:289), DOM9-112-153 (SEQ ID NO:290), DOM9-112-154 (SEQ ID NO:291), DOM9-112-155 (SEQ ID NO:292), DOM9-112-156 (SEQ ID NO:293), DOM9-112-157 (SEQ ID NO:294), DOM9-112-158 (SEQ ID NO:295), DOM9-112-159 (SEQ ID NO:296), DOM9-112-160 (SEQ ID NO:297), DOM9-112-161 (SEQ ID NO:298), DOM9-112-162 (SEQ ID NO:299), DOM9-112-163 (SEQ ID NO:300), DOM9-112-164 (SEQ ID NO:301), DOM9-112-165 (SEQ ID NO:302), DOM9-112-166 (SEQ ID NO:303), DOM9-112-167 (SEQ ID NO:304), DOM9-112-168 (SEQ ID NO:305), DOM9-112-169 (SEQ ID NO:306), DOM9-112-170 (SEQ ID NO:307), DOM9-112-171 (SEQ ID NO:308), DOM9-112-172 (SEQ ID NO:309), DOM9-112-173 (SEQ ID NO:310), DOM9-112-174 (SEQ ID NO:311), DOM9-112-175 (SEQ ID NO:312), DOM9-112-176 (SEQ ID NO:313), DOM9-112-177 (SEQ ID NO:314), DOM9-112-178 (SEQ ID NO:315), DOM9-112-179 (SEQ ID NO:316), DOM9-112-180 (SEQ ID NO:317), DOM9-112-181 (SEQ ID NO:318), DOM9-112-182 (SEQ ID NO:319), DOM9-112-183 (SEQ ID NO:320), DOM9-112-184 (SEQ ID NO:321), DOM9-112-185 (SEQ ID NO:322), DOM9-112-186 (SEQ ID NO:323), DOM9-112-187 (SEQ ID NO:324), DOM9-112-188 (SEQ ID NO:325), DOM9-112-189 (SEQ ID NO:326), DOM9-112-190 (SEQ ID NO:327), DOM9-112-191 (SEQ ID NO:328), DOM9-112-192 (SEQ ID NO:329), DOM9-112-193 (SEQ ID NO:330), DOM9-112-194 (SEQ ID NO:331), DOM9-112-195 (SEQ ID NO:332), DOM9-112-196 (SEQ ID NO:333), DOM9-112-197 (SEQ ID NO:334), DOM9-112-198 (SEQ ID NO:335), DOM9-112-199 (SEQ ID NO:336), DOM9-112-200 (SEQ ID NO:337), DOM9-112-201 (SEQ ID NO:338), DOM9-112-202 (SEQ ID NO:339), DOM9-120 (SEQ ID NO:340), DOM9-121 (SEQ ID NO:341), DOM9-122 (SEQ ID NO:342), DOM9-123 (SEQ ID NO:343), DOM9-124 (SEQ ID NO:344), DOM9-125 (SEQ ID NO:345), DOM9-128 (SEQ ID NO:346), DOM9-134 (SEQ ID NO:347), DOM9-136 (SEQ ID NO:348), DOM9-26 (SEQ ID NO:500), DOM9-35 (SEQ ID NO:501), DOM9-36 (SEQ ID NO:502), DOM9-37 (SEQ ID NO:503), DOM9-38 (SEQ ID NO:504), DOM9-39 (SEQ ID NO:505), DOM9-40 (SEQ ID NO:506), DOM9-41 (SEQ ID NO:507), DOM9-43 (SEQ ID NO:508), DOM9-44 (SEQ ID NO:509), DOM9-44-500 (SEQ ID NO:510), DOM9-44-501 (SEQ ID NO:511), DOM9-44-502 (SEQ ID NO:512), DOM9-44-503 (SEQ ID NO:513), DOM9-44-504 (SEQ ID NO:514), DOM9-44-505 (SEQ ID NO:515), DOM9-44-506 (SEQ ID NO:516), DOM9-44-507 (SEQ ID NO:517), DOM9-44-509 (SEQ ID NO:518), DOM9-44-510 (SEQ ID NO:519), DOM9-44-511 (SEQ ID NO:520), DOM9-44-512 (SEQ ID NO:521), DOM9-44-513 (SEQ ID NO:522), DOM9-44-514 (SEQ ID NO:523), DOM9-44-515 (SEQ ID NO:524), DOM9-44-516 (SEQ ID NO:525), DOM9-44-517 (SEQ ID NO:526), DOM9-44-518 (SEQ ID NO:527), DOM9-44-519 (SEQ ID NO:528), DOM9-44-520 (SEQ ID NO:529), DOM9-44-521 (SEQ ID NO:530), DOM9-44-522 (SEQ ID NO:531), DOM9-44-523 (SEQ ID NO:532), DOM9-44-524 (SEQ ID NO:533), DOM9-44-525 (SEQ ID NO:534), DOM9-44-526 (SEQ ID NO:535), DOM9-44-527 (SEQ ID NO:536), DOM9-44-528 (SEQ ID NO:537), DOM9-44-529 (SEQ ID NO:538), DOM9-44-530 (SEQ ID NO:539), DOM9-44-531 (SEQ ID NO:540), DOM9-44-532 (SEQ ID NO:541), DOM9-44-533 (SEQ ID NO:542), DOM9-44-534 (SEQ ID NO:543), DOM9-44-535 (SEQ ID NO:544), DOM9-44-536 (SEQ ID NO:545), DOM9-44-537 (SEQ ID NO:546), DOM9-44-538 (SEQ ID NO:547), DOM9-44-539 (SEQ ID NO:548), DOM9-44-540 (SEQ ID NO:549), DOM9-44-541 (SEQ ID NO:550), DOM9-44-542 (SEQ ID NO:551), DOM9-44-543 (SEQ ID NO:552), DOM9-44-544 (SEQ ID NO:553), DOM9-44-545 (SEQ ID NO:554), DOM9-44-546 (SEQ ID NO:555), DOM9-44-547 (SEQ ID NO:556), DOM9-44-548 (SEQ ID NO:557), DOM9-44-549 (SEQ ID NO:558), DOM9-44-550 (SEQ ID NO:559), DOM9-44-551 (SEQ ID NO:560), DOM9-44-552 (SEQ ID NO:561), DOM9-44-553 (SEQ ID NO:562), DOM9-44-554 (SEQ ID NO:563), DOM9-44-555 (SEQ ID NO:564), DOM9-44-556 (SEQ ID NO:565), DOM9-44-557 (SEQ ID NO:566), DOM9-44-558 (SEQ ID NO:567), DOM9-44-559 (SEQ ID NO:568), DOM9-44-560 (SEQ ID NO:569), DOM9-44-561 (SEQ ID NO:570), DOM9-44-562 (SEQ ID NO:571), DOM9-44-563 (SEQ ID NO:572), DOM9-44-564 (SEQ ID NO:573), DOM9-44-565 (SEQ ID NO:574), DOM9-44-566 (SEQ ID NO:575), DOM9-44-625 (SEQ ID NO:576), DOM9-44-626 (SEQ ID NO:577), DOM9-44-627 (SEQ ID NO:578), DOM9-44-628 (SEQ ID NO:579), DOM9-44-629 (SEQ ID NO:580), DOM9-44-630 (SEQ ID NO:581), DOM9-44-631 (SEQ ID NO:582), DOM9-44-632 (SEQ ID NO:583), DOM9-44-633 (SEQ ID NO:584), DOM9-44-634 (SEQ ID NO:585), DOM9-44-636 (SEQ ID NO:586), DOM9-44-637 (SEQ ID NO:587), DOM9-44-639 (SEQ ID NO:588), DOM9-44-640 (SEQ ID NO:589), DOM9-44-641 (SEQ ID NO:590), DOM9-44-642 (SEQ ID NO:591), DOM9-44-643 (SEQ ID NO:592), DOM9-44-644 (SEQ ID NO:593), DOM9-45 (SEQ ID NO:594), DOM9-46 (SEQ ID NO:595), DOM9-47 (SEQ ID NO:596), DOM9-48 (SEQ ID NO:597), DOM9-143 (SEQ ID NO:598), DOM9-144 (SEQ ID NO:599), DOM9-146 (SEQ ID NO:600), DOM9-152 (SEQ ID NO:601), DOM9-155 (SEQ ID NO:602), DOM9-155-001 (SEQ ID NO:603), DOM9-155-3 (SEQ ID NO:604), DOM9-155-5 (SEQ ID NO:605), DOM9-155-8 (SEQ ID NO:606), DOM9-155-9 (SEQ ID NO:607), DOM9-155-11 (SEQ ID NO:608), DOM9-155-13 (SEQ ID NO:609), DOM9-155-14 (SEQ ID NO:610), DOM9-155-17 (SEQ ID NO:611), DOM9-155-19 (SEQ ID NO:612), DOM9-155-20 (SEQ ID NO:613), DOM9-155-22 (SEQ ID NO:614), DOM9-155-23 (SEQ ID NO:615), DOM9-155-24 (SEQ ID NO:616), DOM9-155-25 (SEQ ID NO:617), DOM9-155-26 (SEQ ID NO:618), DOM9-155-27 (SEQ ID NO:619), DOM9-155-28 (SEQ ID NO:620), DOM9-155-29 (SEQ ID NO:621), DOM9-155-30 (SEQ ID NO:622), DOM9-155-31 (SEQ ID NO:623), DOM9-155-32 (SEQ ID NO:624), DOM9-155-33 (SEQ ID NO:625), DOM9-155-34 (SEQ ID NO:626), DOM9-155-35 (SEQ ID NO:627), DOM9-155-36 (SEQ ID NO:628), DOM9-155-37 (SEQ ID NO:629), DOM9-155-38 (SEQ ID NO:630), DOM9-155-39 (SEQ ID NO:631), DOM9-155-41 (SEQ ID NO:632), DOM9-155-42 (SEQ ID NO:633), DOM9-155-43 (SEQ ID NO:634), DOM9-155-44 (SEQ ID NO:635), DOM9-155-45 (SEQ ID NO:636), DOM9-155-46 (SEQ ID NO:637), DOM9-155-47 (SEQ ID NO:638), DOM9-155-48 (SEQ ID NO:639), DOM9-155-49 (SEQ ID NO:640), DOM9-155-50 (SEQ ID NO:641), DOM9-155-51 (SEQ ID NO:642), DOM9-155-52 (SEQ ID NO:643), DOM9-155-53 (SEQ ID NO:644), DOM9-158 (SEQ ID NO:645), DOM9-160 (SEQ ID NO:646), DOM9-161 (SEQ ID NO:647), DOM9-162 (SEQ ID NO:648), DOM9-163 (SEQ ID NO:649) and DOM9-164 (SEQ ID NO:650).

[0226] In some embodiments, the polypeptide domain that has a binding site with binding specificity for IL-4 (e.g. a dAb) comprises an amino acid sequence that has at least about 80%, at least about 85%, at least about 90%, at least about 91%, at least about 92%, at least about 93%, at least about 94%, at least about 95%, at least about 96%, at least about 97%, at least about 98%, or at least about 99% amino acid sequence identity with the amino acid sequence or a dAb selected from the group consisting of DOM9-155-77 (SEQ ID NO:2426), DOM9-155-78 (SEQ ID NO:2427), DOM9-112-204 (SEQ ID NO:2428), DOM9-112-205 (SEQ ID NO:2429), DOM9-112-206 (SEQ ID NO:2430), DOM9-112-207 (SEQ ID NO:2431), DOM9-112-208 (SEQ ID NO:2432), DOM9-112-209 (SEQ ID NO:2433), DOM9-112-210 (SEQ ID NO:2434), DOM9-112-211 (SEQ ID NO:2435), DOM9-112-212 (SEQ ID NO:2436), DOM9-112-213 (SEQ ID NO:2437), DOM9-112-214 (SEQ ID NO:2438), DOM9-112-215 (SEQ ID NO:2439), DOM9-112-216 (SEQ ID NO:2440), DOM9-112-217 (SEQ ID NO:2441), DOM9-112-218 (SEQ ID NO:2442), DOM9-112-219 (SEQ ID NO:2443), DOM9-112-220 (SEQ ID NO:2444), DOM9-112-221 (SEQ ID NO:2445), DOM9-112-222 (SEQ ID NO:2446), DOM9-112-223 (SEQ ID NO:2447), DOM9-112-224 (SEQ ID NO:2448), DOM9-112-225 (SEQ ID NO:2449), DOM9-112-226 (SEQ ID NO:2450), DOM9-112-227 (SEQ ID NO:2451), DOM9-112-228 (SEQ ID NO:2452), DOM9-112-229 (SEQ ID NO:2453), DOM9-112-230 (SEQ ID NO:2454), DOM9-112-231 (SEQ ID NO:2455), DOM9-112-233 (SEQ ID NO:1734), DOM9-112-232 (SEQ ID NO:1735) and DOM9-112-234 (SEQ ID NO:1736).

[0227] In preferred embodiments, the polypeptide domain that has a binding site with binding specificity for IL-4 comprises an amino acid sequence that has at least about 90%, at least about 91%, at least about 92%, at least about 93%, at least about 94%, at least about 95%, at least about 96%, at least about 97%, at least about 98%, or at least about 99% amino acid sequence identity with the amino acid sequence or a dAb selected from the group consisting of DOM9-112-155 (SEQ ID NO:292), DOM9-112-168 (SEQ ID NO:305), DOM9-112-174 (SEQ ID NO:311), DOM9-112-199 (SEQ ID NO:336), DOM9-112-200 (SEQ ID NO:337), DOM9-44-502 (SEQ ID NO:512), DOM9-155-5 (SEQ ID NO:605), DOM9-155-25 (SEQ ID NO:617), DOM9-155-77 (SEQ ID NO:2426), DOM9-155-78 (SEQ ID NO:2427), DOM9-112-202 (SEQ ID NO:339), DOM9-112-209 (SEQ ID NO:2433), DOM9-112-210 (SEQ ID NO:2434) and DOM9-44-502 (SEQ ID NO:512). For example, the polypeptide domain that has a binding site with binding specificity for IL-4 can comprise DOM9-112-155 (SEQ ID NO:292), DOM9-112-168 (SEQ ID NO:305), DOM9-112-174 (SEQ ID NO:311), DOM9-112-199 (SEQ ID NO:336), DOM9-112-200 (SEQ ID NO:337), DOM9-44-502 (SEQ ID NO:512), DOM9-155-5 (SEQ ID NO:605, DOM9-155-25 (SEQ ID NO:617), DOM9-155-77 (SEQ ID NO:2426), DOM9-155-78 (SEQ ID NO:2427), DOM9-112-202 (SEQ ID NO:339), DOM9-112-209 (SEQ ID NO:2433), DOM9-112-210 (SEQ ID NO:2434) and DOM9-44-502 (SEQ ID NO:512).

[0228] In some embodiments, the polypeptide domain that has a binding site with binding specificity for IL-4 competes with any of the dAbs disclosed herein for binding to IL-4.

[0229] Preferably the polypeptide domain that has a binding site with binding specificity for IL-4 is an immunoglobulin single variable domain. The polypeptide domain that has a binding site with binding specificity for IL-4 can comprise any suitable immunoglobulin variable domain, and preferably comprises a human variable domain or a variable domain that comprises human framework regions. In certain embodiments, the polypeptide domain that has a binding site with binding specificity for IL-4 comprises a universal framework, as described herein.

[0230] The universal framework can be a V_{L} framework (Vλ or V_{κ}), such as a framework that comprises the framework amino acid sequences encoded by the human germline DPK1, DPK2, DPK3, DPK4, DPK5, DPK6, DPK7, DPK8, DPK9, DPK10, DPK12, DPK13, DPK15, DPK16, DPK18, DPK19, DPK20, DPK21, DPK22, DPK23, DPK24, DPK25, DPK26 or DPK 28 immunoglobulin gene segment. If desired, the V_{L} framework can further comprise the framework amino acid sequence encoded by the human germline J_{κ}1, J_{κ}2, J_{κ}3, J_{κ}4, or J_{κ}5 immunoglobulin gene segment.

[0231] In other embodiments the universal framework can be a V_{H} framework, such as a framework that comprises the framework amino acid sequences encoded by the human germline DP4, DP7, DP8, DP9, DP10, DP31, DP33, DP38, DP45, DP46, DP47, DP49, DP50, DP51, DP53, DP54, DP65, DP66, DP67, DP68 or DP69 immunoglobulin gene segment. If desired, the V_{H} framework can further comprise the framework amino acid sequence encoded by the human germline J_{H}1, J_{H}2, J_{H}3, J_{H}4, J_{H}4b, J_{H}5 and J_{H}6 immunoglobulin gene segment.

[0232] In certain embodiments, the polypeptide domain that has a binding site with binding specificity for IL-4 comprises one or more framework regions comprising an amino acid sequence that is the same as the amino acid sequence of a corresponding framework region encoded by a human germline antibody gene segment, or the amino acid sequences of one or more of said framework regions collectively comprise up to 5 amino acid differences relative to the amino acid sequence of said corresponding framework region encoded by a human germline antibody gene segment.

[0233] In other embodiments, the amino acid sequences of FW1, FW2, FW3 and FW4 of the polypeptide domain that have a binding site with binding specificity for IL-4 are the same as the amino acid sequences of corresponding framework regions encoded by a human germline antibody gene segment, or the amino acid sequences of FW1, FW2, FW3 and FW4 collectively contain up to 10 amino acid differences relative to the amino acid sequences of corresponding framework regions encoded by said human germline antibody gene segment.

[0234] In other embodiments, the polypeptide domain that has a binding site with binding specificity for IL-4 comprises FW1, FW2 and FW3 regions, and the amino acid sequence of said FW1, FW2 and FW3 regions are the same as the amino acid sequences of corresponding framework regions encoded by human germline antibody gene segments.

[0235] In particular embodiments, the polypeptide domain that has a binding site with binding specificity for IL-4 comprises the DPK9 V_{L} framework, or a V_{H} framework selected from the group consisting of DP47, DP45 and DP38. The polypeptide domain that has a binding site with binding specificity for IL-4 can comprise a binding site for a generic ligand, such as protein A, protein L and protein G.

[0236] The ligand of the invention (e.g., ligand that has binding specificity for IL-4 and IL-13, ligand that has binding specificity for IL-4) can comprise a non-immunoglobulin binding moiety that has binding specificity for IL-4 and preferably inhibits a function of IL-4 (e.g., binding to receptor), wherein the non-immunoglobulin binding moiety comprises one, two or three of the CDRs of a V_{H}, V_{L} or V_{HH} that binds IL-4 and a suitable scaffold. In certain embodiments, the non-immunoglobulin binding moiety comprises CDR3 but not CDR1 or CDR2 of a V_{H}, V_{L} or V_{HH} that binds IL-4 and a suitable scaffold. In other embodiments, the non-immunoglobulin binding moiety comprises CDR1 and CDR2, but not CDR3 of a V_{H}, V_{L} or V_{HH} that binds IL-4 and a suitable scaffold. In other embodiments, the non-immunoglobulin binding moiety comprises CDR1, CDR2 and CDR3 of a V_{H}, V_{L} or V_{HH} that binds IL-4 and a suitable scaffold. Preferably, the CDR or CDRs of the ligand of these embodiments is a CDR or CDRs of an anti-IL-4 dAb described herein. Preferably, the non-immunoglobulin binding moiety comprises one, two, or three of the CDRs of one of the anti-IL-4 dAbs disclosed herein. In other embodiments, the ligand (e.g., ligand that has binding specificity for IL-4 and IL-13, ligand that has binding specificity for IL-4) comprises only CDR3 of a V_{H}, V_{L} or V_{HH} that binds IL-4. The non-immunoglobulin domain can comprise an amino acid sequence that has one or more regions that have sequence identity to one, two or three of the CDRs of an anti-IL-4 dAb described herein. For example, the non-immunoglobulin domain can have an amino acid sequence that contains at least about 50%, at least about 60%, at least about 70%, at least about 80%, or at least about 90% sequence identity with CDR1, CDR2 and/or CDR3 of an anti-IL-4 dAb disclosed herein. Even more preferably, the non-immunoglobulin binding moiety comprises one, two, or three of the CDRs of DOM9-44-502 (SEQ ID NO:512), DOM9-155-5 (SEQ ID NO:605), DOM9-155-25 (SEQ ID NO:617), DOM9-112-155 (SEQ ID NO:292), DOM9-112-168 (SEQ ID NO:305), DOM9-112-174 (SEQ ID NO:311), DOM9-112-199 (SEQ ID NO:336), and DOM9-112-200 (SEQ ID NO:337).

[0237] In certain embodiments, the polypeptide domain that has a binding site with binding specificity for IL-4 is substantially resistant to aggregation. For example, in some embodiments, less than about 10%, less than about 9%, less than about 8%, less than about 7%, less than about 6%, less than about 5%, less than about 4%, less than about 3%, less than about 2% or less than about 1% of the polypeptide domain that has a binding site with binding specificity for IL-4 aggregates when a 1-5 mg/ml, 5-10 mg/ml, 10-20 mg/ml, 20-50 mg/ml, 50-100 mg/ml, 100-200 mg/ml or 200-500 mg/ml solution of ligand or dAb in a solvent that is routinely used for drug formulation such as saline, buffered saline, citrate buffer saline, water, an emulsion, and, any of these solvents with an acceptable excipient such as those approved by the FDA, is maintained at about 22° C., 22-25° C., 25-30° C., 30-37° C., 37-40° C., 40-50° C., 50-60° C., 60-70° C., 70-80° C., 15-20° C., 10-15° C., 5-10° C., 2-5° C., 0-2° C., −10° C. to 0° C., −20° C. to −10° C., −40° C. to −20° C., −60° C. to −40° C., or −80° C. to −60° C., for a period of about time, for example, 10 minutes, 1 hour, 8 hours, 24 hours, 2 days, 3 days, 4 days, 1 week, 2 weeks, 3 weeks, 1 month, 2 months, 3 months, 4 months, 6 months, 1 year, or 2 years.

[0238] Aggregation can be assessed using any suitable method, such as, by microscopy, assessing turbidity of a solution by visual inspection or spectroscopy or any other suitable method. Preferably, aggregation is assessed by dynamic light scattering. Polypeptide domains that have a binding site with binding specificity for IL-4 that are resistant to aggregation provide several advantages. For example, such polypeptide domains that have a binding site with binding specificity for IL-4 can readily be produced in high yield as soluble proteins by expression using a suitable biological production system, such as E. coli, and can be formulated and/or stored at higher concentrations than conventional polypeptides, and with less aggregation and loss of activity.

[0239] In addition, the polypeptide domain that has a binding site with binding specificity for IL-4 that is resistant to aggregation can be produced more economically than other antigen- or epitope-binding polypeptides (e.g., conventional antibodies). For example, generally, preparation of antigen- or epitope-binding polypeptides intended for in vivo applications includes processes (e.g., gel filtration) that remove aggregated polypeptides. Failure to remove such aggregates can result in a preparation that is not suitable for in vivo applications because, for example, aggregates of an antigen-binding polypeptide that is intended to act as an antagonist can function as an agonist by inducing cross-linking or clustering of the target antigen. Protein aggregates can also reduce the efficacy of therapeutic polypeptide by inducing an immune response in the subject to which they are administered.

[0240] In contrast, the aggregation resistant polypeptide domain that has a binding site with binding specificity for IL-4 of the invention can be prepared for in vivo applications without the need to include process steps that remove aggregates, and can be used in in vivo applications without the aforementioned disadvantages caused by polypeptide aggregates.

[0241] In some embodiments, a polypeptide domain that has a binding site with binding specificity for IL-4 unfolds reversibly when heated to a temperature (Ts) and cooled to a temperature (Tc), wherein Ts is greater than the melting temperature (Tm) of the polypeptide domain that has a binding site with binding specificity for IL-4, and Tc is lower than the melting temperature of the polypeptide domain that has a binding site with binding specificity for IL-4. For example, a polypeptide domain that has a binding site with binding specificity for IL-4 can unfold reversibly when heated to 80° C. and cooled to about room temperature. A polypeptide that unfolds reversibly loses function when unfolded but regains function upon refolding. Such polypeptides are distinguished from polypeptides that aggregate when unfolded or that improperly refold (misfolded polypeptides), i.e., do not regain function.

[0242] Polypeptide unfolding and refolding can be assessed, for example, by directly or indirectly detecting polypeptide structure using any suitable method. For example, polypeptide structure can be detected by circular dichroism (CD) (e.g., far-UV CD, near-UV CD), fluorescence (e.g., fluorescence of tryptophan side chains), susceptibility to proteolysis, nuclear magnetic resonance (NMR), or by detecting or measuring a polypeptide function that is dependent upon proper folding (e.g., binding to target ligand, binding to generic ligand). In one example, polypeptide unfolding is assessed using a functional assay in which loss of binding function (e.g., binding a generic and/or target ligand, binding a substrate) indicates that the polypeptide is unfolded.

[0243] The extent of unfolding and refolding of a polypeptide domain that has a binding site with binding specificity for IL-4 can be determined using an unfolding or denaturation curve. An unfolding curve can be produced by plotting temperature as the ordinate and the relative concentration of folded polypeptide as the abscissa. The relative concentration of folded polypeptide domain that has a binding site with binding specificity for IL-4 can be determined directly or indirectly using any suitable method (e.g., CD, fluorescence, binding assay). For example, a polypeptide domain that has a binding site with binding specificity for IL-4 solution can be prepared and ellipticity of the solution determined by CD. The ellipticity value obtained represents a relative concentration of folded ligand or dAb monomer of 100%. The polypeptide domain that has a binding site with binding specificity for IL-4 in the solution is then unfolded by incrementally raising the temperature of the solution and ellipticity is determined at suitable increments (e.g., after each increase of one degree in temperature). The polypeptide domain that has a binding site with binding specificity for IL-4 in solution is then refolded by incrementally reducing the temperature of the solution and ellipticity is determined at suitable increments. The data can be plotted to produce an unfolding curve and a refolding curve. The unfolding and refolding curves have a characteristic sigmoidal shape that includes a portion in which the polypeptide domain that has a binding site with binding specificity for IL-4 molecules is folded, an unfolding/refolding transition in which the polypeptide domain that has a binding site with binding specificity for IL-4 molecules is unfolded to various degrees, and a portion in which polypeptide domain that has a binding site with binding specificity for IL-4 is unfolded. The y-axis intercept of the refolding curve is the relative amount of refolded polypeptide domain that has a binding site with binding specificity for IL-4 recovered. A recovery of at least about 50%, or at least about 60%, or at least about 70%, or at least about 75%, or at least about 80%, or at least about 85%, or at least about 90%, or at least about 95% is indicative that the ligand or dAb monomer unfolds reversibly.

[0244] In a preferred embodiment, reversibility of unfolding of polypeptide domain that has a binding site with binding specificity for IL-4 is determined by preparing a polypeptide domain that has a binding site with binding specificity for IL-4 solution and plotting heat unfolding and refolding curves. The polypeptide domain that has a binding site with binding specificity for IL-4 solution can be prepared in any suitable solvent, such as an aqueous buffer that has a pH suitable to allow polypeptide domain that has a binding site with binding specificity for IL-4 to dissolve (e.g., pH that is about 3 units above or below the isoelectric point (pI)). The polypeptide domain that has a binding site with binding specificity for IL-4 solution is concentrated enough to allow unfolding/folding to be detected. For example, the ligand or dAb monomer solution can be about 0.1 μM to about 100 μM, or preferably about 1 μM to about 10 μM.

[0245] If the melting temperature (Tm) of the polypeptide domain that has a binding site with binding specificity for IL-4 is known, the solution can be heated to about ten degrees below the Tm (Tm-10) and folding assessed by ellipticity or fluorescence (e.g., far-UV CD scan from 200 nm to 250 nm, fixed wavelength CD at 235 nm or 225 nm; tryptophan fluorescent emission spectra at 300 to 450 nm with excitation at 298 nm) to provide 100% relative folded ligand or dAb monomer. The solution is then heated to at least ten degrees above Tm (Tm+10) in predetermined increments (e.g., increases of about 0.1 to about 1 degree), and ellipticity or fluorescence is determined at each increment. Then, the polypeptide domain that has a binding site with binding specificity for IL-4 is refolded by cooling to at least Tm-10 in predetermined increments and ellipticity or fluorescence determined at each increment. If the melting temperature of the polypeptide domain that has a binding site with binding specificity for IL-4 is not known, the solution can be unfolded by incrementally heating from about 25° C. to about 100° C. and then refolded by incrementally cooling to at least about 25° C., and ellipticity or fluorescence at each heating and cooling increment is determined. The data obtained can be plotted to produce an unfolding curve and a refolding curve, in which the y-axis intercept of the refolding curve is the relative amount of refolded protein recovered. In some embodiments, the polypeptide domain that has a binding site with binding specificity for VEGF does not comprise a Camelid immunoglobulin variable domain, or one or more framework amino acids that are unique to immunoglobulin variable domains encoded by Camelid germline antibody gene segments.

[0246] Preferably, the polypeptide domain that has a binding site with binding specificity for IL-4 is secreted in a quantity of at least about 0.5 mg/L when expressed in E. coli or in Pichia species (e.g., P. pastoris). In other preferred embodiments, polypeptide domain that has a binding site with binding specificity for IL-4 is secreted in a quantity of at least about 0.75 mg/L, at least about 1 mg/L, at least about 4 mg/L, at least about 5 mg/L, at least about 10 mg/L, at least about 15 mg/L, at least about 20 mg/L, at least about 25 mg/L, at least about 30 mg/L, at least about 35 mg/L, at least about 40 mg/L, at least about 45 mg/L, or at least about 50 mg/L, or at least about 100 mg/L, or at least about 200 mg/L, or at least about 300 mg/L, or at least about 400 mg/L, or at least about 500 mg/L, or at least about 600 mg/L, or at least about 700 mg/L, or at least about 800 mg/L, at least about 900 mg/L, or at least about 1 g/L when expressed in E. coli or in Pichia species (e.g., P. pastoris). In other preferred embodiments, a polypeptide domain that has a binding site with binding specificity for IL-4 is secreted in a quantity of at least about 1 mg/L to at least about 1 g/L, at least about 1 mg/L to at least about 750 mg/L, at least about 100 mg/L to at least about 1 g/L, at least about 200 mg/L to at least about 1 g/L, at least about 300 mg/L to at least about 1 g/L, at least about 400 mg/L to at least about 1 g/L, at least about 500 mg/L to at least about g/L, at least about 600 mg/L to at least about 1 g/L, at least about 700 mg/L to at least about 1 g/L, at least about 800 mg/L to at least about 1 g/L, or at least about 900 mg/L to at least about 1 g/L when expressed in E. coli or in Pichia species (e.g., P. pastoris). Although, polypeptide domain that has a binding site with binding specificity for IL-4 described herein can be secretable when expressed in E. coli or in Pichia species (e.g., P. pastoris), they can be produced using any suitable method, such as synthetic chemical methods or biological production methods that do not employ E. coli or Pichia species.

Polypeptide Domains that Bind IL-13

[0247] The invention provides polypeptide domains (e.g., dAb) that have a binding site with binding specificity for IL-13. In preferred embodiments, the polypeptide domain (e.g., dAb) binds to IL-13 with an affinity (KD; KD=K_{off}(kd)/Kₒₙ(ka)) of 300 nM to 1 pM (i.e., 3×10⁻⁷ to 5×10⁻¹²M), preferably 100 nM to 1 pM, or 50 nM to 10 pM, more preferably 10 nM to 100 pM and most preferably about 1 nM, for example a K_{D} of 1×10⁻⁷ M or less, preferably 1×10⁻⁸ M or less, more preferably about 1×10⁻⁹ M or less, 1×10⁻¹⁰ M or less or 1×10⁻¹¹ M or less; and/or a K_{off} rate constant of 5×10⁻¹ s⁻¹ to 1×10⁻⁷ s⁻¹, preferably 1×10⁻² s⁻¹ to 1×10⁻⁶ s⁻¹, more preferably 5×10⁻³ s⁻¹ to 1×10⁻⁵ s⁻¹, for example 5×10⁻¹ s⁻¹ or less, preferably 1×10⁻² s⁻¹ or less, advantageously 1×10⁻³ s⁻¹ or less, more preferably 1×10⁴ s⁻¹ or less, still more preferably 1×10⁻⁵ s⁻¹ or less, and most preferably 1×10⁻⁶ s⁻¹ or less as determined by surface plasmon resonance.

[0248] In some embodiments, a polypeptide domain that has a binding site with binding specificity for IL-13 competes for binding to IL-13 with a dAb selected from the group consisting of DOM10-53 (SEQ ID NO:967), DOM10-53-1 (SEQ ID NO:968), DOM10-53-2 (SEQ ID NO:969), DOM10-53-3 (SEQ ID NO:970), DOM10-53-4 (SEQ ID NO:971), DOM10-53-5 (SEQ ID NO:972), DOM10-53-6 (SEQ ID NO:973), DOM10-53-7 (SEQ ID NO:974), DOM10-53-8 (SEQ ID NO:975), DOM10-53-9 (SEQ ID NO:976), DOM10-53-10 (SEQ ID NO:977), DOM10-53-11 (SEQ ID NO:978), DOM10-53-12 (SEQ ID NO:979), DOM10-53-13 (SEQ ID NO:980), DOM10-53-14 (SEQ ID NO:981), DOM10-53-15 (SEQ ID NO:982), DOM10-53-16 (SEQ ID NO:983), DOM10-53-17 (SEQ ID NO:984), DOM10-53-18 (SEQ ID NO:985), DOM10-53-19 (SEQ ID NO:986), DOM10-53-20 (SEQ ID NO:987), DOM10-53-21 (SEQ ID NO:988), DOM10-53-122 (SEQ ID NO:989), DOM10-53-123 (SEQ ID NO:990), DOM10-53-24 (SEQ ID NO:991), DOM10-53-25 (SEQ ID NO:992), DOM10-53-26 (SEQ ID NO:993), DOM10-53-27 (SEQ ID NO:994), DOM10-53-28 (SEQ ID NO:995), DOM10-53-29 (SEQ ID NO:996), DOM10-53-30 (SEQ ID NO:997), DOM10-53-31 (SEQ ID NO:998), DOM10-53-32 (SEQ ID NO:1999), DOM10-53-43 (SEQ ID NO:1000), DOM10-53-44 (SEQ ID NO:1001), DOM10-53-45 (SEQ ID NO:1002), DOM10-53-46 (SEQ ID NO:1003), DOM10-53-47 (SEQ ID NO:1004), DOM10-53-48 (SEQ ID NO:1005), DOM10-53-49 (SEQ ID NO:1006), DOM10-53-50 (SEQ ID NO:1007), DOM10-53-51 (SEQ ID NO:1008), DOM10-53-52 (SEQ ID NO:1009), DOM10-53-53 (SEQ ID NO:1010), DOM10-53-54 (SEQ ID NO:1011), DOM10-53-55 (SEQ ID NO:1012), DOM10-53-56 (SEQ ID NO:1013), DOM10-53-57 (SEQ ID NO:1014), DOM10-53-59 (SEQ ID NO:1015), DOM10-53-60 (SEQ ID NO:1016), DOM10-53-61 (SEQ ID NO:1017), DOM10-53-62 (SEQ ID NO:1018), DOM10-53-63 (SEQ ID NO:1019), DOM10-53-64 (SEQ ID NO:1020), DOM10-53-65 (SEQ ID NO:1021), DOM10-53-66 (SEQ ID NO:1022), DOM10-53-67 (SEQ ID NO:1023), DOM10-53-68 (SEQ ID NO:1024), DOM10-53-69 (SEQ ID NO:1025), DOM10-53-70 (SEQ ID NO:1026), DOM10-53-71 (SEQ ID NO:1027), DOM10-53-72 (SEQ ID NO:1028), DOM10-53-73 (SEQ ID NO:1029), DOM10-53-74 (SEQ ID NO:1030), DOM10-53-75 (SEQ ID NO:1031), DOM10-53-76 (SEQ ID NO:1032), DOM10-53-77 (SEQ ID NO:1033), DOM10-53-78 (SEQ ID NO:1034), DOM10-53-79 (SEQ ID NO:1035), DOM10-53-80 (SEQ ID NO:1036), DOM10-53-81 (SEQ ID NO:1037), DOM10-53-82 (SEQ ID NO:1038), DOM10-53-83 (SEQ ID NO:1039), DOM10-53-84 (SEQ ID NO:1040), DOM10-53-85 (SEQ ID NO:1041), DOM10-53-86 (SEQ ID NO:1042), DOM10-53-87 (SEQ ID NO:1043), DOM10-53-88 (SEQ ID NO:1044), DOM10-53-89 (SEQ ID NO:1045), DOM10-53-91 (SEQ ID NO:1046), DOM10-53-92 (SEQ ID NO:1047), DOM10-53-93 (SEQ ID NO:1048), DOM10-53-94 (SEQ ID NO:1049), DOM10-53-95 (SEQ ID NO:1050), DOM10-53-96 (SEQ ID NO:1051), DOM10-53-97 (SEQ ID NO:1052), DOM10-53-98 (SEQ ID NO:1053), DOM10-53-99 (SEQ ID NO:1054), DOM10-53-100 (SEQ ID NO:1055), DOM10-53-103 (SEQ ID NO:1056), DOM10-53-105 (SEQ ID NO:1057), DOM10-53-106 (SEQ ID NO:1058), DOM10-53-108 (SEQ ID NO:1059), DOM10-53-110 (SEQ ID NO:1060), DOM10-53-111 (SEQ ID NO:1061), DOM10-53-112 (SEQ ID NO:10632), DOM10-53-114 (SEQ ID NO:1063), DOM10-53-115 (SEQ ID NO:1064), DOM10-53-116 (SEQ ID NO:1065), DOM10-53-117 (SEQ ID NO:1066), DOM10-53-119 (SEQ ID NO:1067), DOM10-53-120 (SEQ ID NO:1068), DOM10-53-122 (SEQ ID NO:1069), DOM10-53-201 (SEQ ID NO:1070), DOM10-53-203 (SEQ ID NO:1071), DOM10-53-204 (SEQ ID NO:1072), DOM10-53-205 (SEQ ID NO:1073), DOM10-53-206 (SEQ ID NO:1074), DOM10-53-207 (SEQ ID NO:1075), DOM10-53-208 (SEQ ID NO:1076), DOM10-53-209 (SEQ ID NO:1077), DOM10-53-210 (SEQ ID NO:1078), DOM10-53-211 (SEQ ID NO:1079), DOM10-53-213 (SEQ ID NO:1080), DOM10-53-214 (SEQ ID NO:1081), DOM10-53-215 (SEQ ID NO:1082), DOM10-53-216 (SEQ ID NO:1083), DOM10-53-217 (SEQ ID NO:1084), DOM10-53-1218 (SEQ ID NO:1085), DOM10-53-219 (SEQ ID NO:1086), DOM10-53-220 (SEQ ID NO:1087), DOM10-53-221 (SEQ ID NO:1088), DOM10-53-222 (SEQ ID NO:1089), DOM10-53-223 (SEQ ID NO:1090), DOM10-53-224 (SEQ ID NO:1091), DOM10-53-225 (SEQ ID NO:1092), DOM10-53-226 (SEQ ID NO:1093), DOM10-53-227 (SEQ ID NO:1094), DOM10-53-228 (SEQ ID NO:1095), DOM10-53-229 (SEQ ID NO:1096), DOM10-53-230 (SEQ ID NO:1097), DOM10-53-231 (SEQ ID NO:1098), DOM10-53-232 (SEQ ID NO:1099), DOM10-53-233 (SEQ ID NO:1100), DOM10-53-234 (SEQ ID NO:1101), DOM10-53-235 (SEQ ID NO:1102), DOM10-53-236 (SEQ ID NO:1103), DOM10-53-237 (SEQ ID NO:1104), DOM10-53-238 (SEQ ID NO:1105), DOM10-53-239 (SEQ ID NO:1106), DOM10-53-240 (SEQ ID NO:1107), DOM10-53-241 (SEQ ID NO:1108), DOM10-53-242 (SEQ ID NO:1109), DOM10-53-243 (SEQ ID NO:1110), DOM10-53-244 (SEQ ID NO:1111), DOM10-53-245 (SEQ ID NO:1112), DOM10-53-246 (SEQ ID NO:1113), DOM10-53-247 (SEQ ID NO:1114), DOM10-53-248 (SEQ ID NO:1115), DOM10-53-249 (SEQ ID NO:1116), DOM10-53-250 (SEQ ID NO:1117), DOM10-53-251 (SEQ ID NO:1118), DOM10-53-252 (SEQ ID NO:1119), DOM10-53-253 (SEQ ID NO:1120), DOM10-53-254 (SEQ ID NO:1121), DOM10-53-255 (SEQ ID NO:1122), DOM10-53-256 (SEQ ID NO:1123), DOM10-53-257 (SEQ ID NO:1124), DOM10-53-258 (SEQ ID NO:1125), DOM10-53-259 (SEQ ID NO:1126), DOM10-53-260 (SEQ ID NO:1127), DOM10-53-261 (SEQ ID NO:1128), DOM10-53-262 (SEQ ID NO:1129), DOM10-53-263 (SEQ ID NO:1130), DOM10-53-264 (SEQ ID NO:1131), DOM10-53-265 (SEQ ID NO:1132), DOM10-53-266 (SEQ ID NO:1133), DOM10-53-267 (SEQ ID NO:1134), DOM10-53-268 (SEQ ID NO:1135), DOM10-53-269 (SEQ ID NO:1136), DOM10-53-270 (SEQ ID NO:1137), DOM10-53-271 (SEQ ID NO:1138), DOM10-53-272 (SEQ ID NO:1139), DOM10-53-273 (SEQ ID NO:1140), DOM10-53-274 (SEQ ID NO:1141), DOM10-53-275 (SEQ ID NO:1142), DOM10-53-276 (SEQ ID NO:1143), DOM10-53-277 (SEQ ID NO:1144), DOM10-53-278 (SEQ ID NO:1145), DOM10-53-279 (SEQ ID NO:1146), DOM10-53-280 (SEQ ID NO:1147), DOM10-53-281 (SEQ ID NO:1148), DOM10-53-282 (SEQ ID NO:1149), DOM10-53-283 (SEQ ID NO:1150), DOM10-53-284 (SEQ ID NO:1151), DOM10-53-285 (SEQ ID NO:1152), DOM10-53-286 (SEQ ID NO:1153), DOM10-53-287 (SEQ ID NO:1154), DOM10-53-288 (SEQ ID NO:1155), DOM10-53-289 (SEQ ID NO:1156), DOM10-53-290 (SEQ ID NO:1157), DOM10-53-291 (SEQ ID NO:1158), DOM10-53-292 (SEQ ID NO:1159), DOM10-53-293 (SEQ ID NO:1160), DOM10-53-294 (SEQ ID NO:1161), DOM10-53-295 (SEQ ID NO:1162), DOM10-53-296 (SEQ ID NO:1163), DOM10-53-297 (SEQ ID NO:1164), DOM10-53-298 (SEQ ID NO:1165), DOM10-53-299 (SEQ ID NO:1166), DOM10-53-300 (SEQ ID NO:1167), DOM10-53-301 (SEQ ID NO:1168), DOM10-53-302 (SEQ ID NO:1169), DOM10-53-303 (SEQ ID NO:1170), DOM10-53-304 (SEQ ID NO:1171), DOM10-53-305 (SEQ ID NO:1172), DOM10-53-306 (SEQ ID NO:1173), DOM10-53-307 (SEQ ID NO:1174), DOM10-53-308 (SEQ ID NO:1175), DOM10-53-309 (SEQ ID NO:1176), DOM10-53-310 (SEQ ID NO:11787), DOM10-53-311 (SEQ ID NO:1178), DOM10-53-312 (SEQ ID NO:1179), DOM10-53-314 (SEQ ID NO:1180), DOM10-53-315 (SEQ ID NO:1181), DOM10-53-316 (SEQ ID NO:1182), DOM10-53-317 (SEQ ID NO:1183), DOM10-53-318 (SEQ ID NO:1184), DOM10-53-319 (SEQ ID NO:1185), DOM10-53-320 (SEQ ID NO:1186), DOM10-53-321 (SEQ ID NO:1187), DOM10-53-322 (SEQ ID NO:1188), DOM10-53-323 (SEQ ID NO:1189), DOM10-53-324 (SEQ ID NO:1190), DOM10-53-325 (SEQ ID NO:1191), DOM10-53-326 (SEQ ID NO:1192), DOM10-53-327 (SEQ ID NO:1193), DOM10-53-328 (SEQ ID NO:1194), DOM10-53-329 (SEQ ID NO:1195), DOM10-53-330 (SEQ ID NO:1196), DOM10-53-331 (SEQ ID NO:1197), DOM10-53-333 (SEQ ID NO:1198), DOM10-53-334 (SEQ ID NO:1199), DOM10-53-336 (SEQ ID NO:1200), DOM10-53-337 (SEQ ID NO:1201), DOM10-53-338 (SEQ ID NO:1202), DOM10-53-339 (SEQ ID NO:1203), DOM10-53-340 (SEQ ID NO:1204), DOM10-53-341 (SEQ ID NO:1205), DOM10-53-342 (SEQ ID NO:1206), DOM10-53-343 (SEQ ID NO:1207), DOM10-53-344 (SEQ ID NO:1208), DOM10-53-345 (SEQ ID NO:1209), DOM10-53-346 (SEQ ID NO:1210), DOM10-53-347 (SEQ ID NO:1211), DOM10-53-348 (SEQ ID NO:1212), DOM10-53-349 (SEQ ID NO:1213), DOM10-53-350 (SEQ ID NO:1214), DOM10-53-351 (SEQ ID NO:1215), DOM10-53-352 (SEQ ID NO:1216), DOM10-53-353 (SEQ ID NO:1217), DOM10-53-354 (SEQ ID NO:1218), DOM10-53-355 (SEQ ID NO: 1219), DOM10-53-356 (SEQ ID NO:1220), DOM10-53-357 (SEQ ID NO:1221), DOM10-53-358 (SEQ ID NO:1222), DOM10-53-359 (SEQ ID NO:1223), DOM10-53-360 (SEQ ID NO:1224), DOM10-53-361 (SEQ ID NO:1225), DOM10-53-362 (SEQ ID NO:1226), DOM10-53-363 (SEQ ID NO:1227), DOM10-53-364 (SEQ ID NO:1228), DOM10-53-365 (SEQ ID NO:1229), DOM10-53-366 (SEQ ID NO:1230), DOM10-53-367 (SEQ ID NO:1231), DOM10-53-368 (SEQ ID NO:1232), DOM10-53-369 (SEQ ID NO:1233), DOM10-53-370 (SEQ ID NO:1234), DOM10-53-371 (SEQ ID NO:1235), DOM10-53-372 (SEQ ID NO:1236), DOM10-53-373 (SEQ ID NO:1237), DOM10-53-374 (SEQ ID NO:1238), DOM10-53-375 (SEQ ID NO:1239), DOM10-53-376 (SEQ ID NO:1240), DOM10-53-377 (SEQ ID NO:1241), DOM10-53-378 (SEQ ID NO:1242), DOM10-53-379 (SEQ ID NO:1243), DOM10-53-380 (SEQ ID NO:1244), DOM10-53-381 (SEQ ID NO:1245), DOM10-53-382 (SEQ ID NO:1246), DOM10-53-383 (SEQ ID NO:1247), DOM10-53-384 (SEQ ID NO:1248), DOM10-53-385 (SEQ ID NO:1249), DOM10-53-386 (SEQ ID NO:1250), DOM10-53-387 (SEQ ID NO:1251), DOM10-53-388 (SEQ ID NO:1252), DOM10-53-389 (SEQ ID NO:1253), DOM10-53-390 (SEQ ID NO:1254), DOM10-53-391 (SEQ ID NO:1255), DOM10-53-392 (SEQ ID NO:1256), DOM10-53-393 (SEQ ID NO:1257), DOM10-53-394 (SEQ ID NO:1258), DOM10-53-395 (SEQ ID NO:1259), DOM10-53-396 (SEQ ID NO:1260), DOM10-53-400 (SEQ ID NO:1261), DOM10-53-401 (SEQ ID NO:1262), DOM10-53-402 (SEQ ID NO:1263), DOM10-53-403 (SEQ ID NO:1264), DOM10-53-404 (SEQ ID NO:1265), DOM10-53-405 (SEQ ID NO:1266), DOM10-53-406 (SEQ ID NO:1267), DOM10-53-407 (SEQ ID NO:1268), DOM10-53-408 (SEQ ID NO:1269), DOM10-53-409 (SEQ ID NO:1270), DOM10-53-410 (SEQ ID NO:1271), DOM10-53-411 (SEQ ID NO:1272), DOM10-53-412 (SEQ ID NO:1273), DOM10-53-413 (SEQ ID NO:1274), DOM10-53-414 (SEQ ID NO:1275), DOM10-53-415 (SEQ ID NO:1276), DOM10-53-416 (SEQ ID NO:1277), DOM10-53-417 (SEQ ID NO:1278), DOM10-53-418 (SEQ ID NO:1279), DOM10-53-419 (SEQ ID NO:1280), DOM10-53-420 (SEQ ID NO:1281), DOM10-53-421 (SEQ ID NO:1282), DOM10-168 (SEQ ID NO:1508), DOM10-169 (SEQ ID NO:1509), DOM10-176 (SEQ ID NO:1510), DOM10-176-1 (SEQ ID NO:1511), DOM10-176-2 (SEQ ID NO:1512), DOM10-173 (SEQ ID NO:1513), DOM10-176-4 (SEQ ID NO:1514), DOM10-176-5 (SEQ ID NO:1515), DOM10-176-6 (SEQ ID NO:1516), DOM10-176-23 (SEQ ID NO:1517), DOM10-176-24 (SEQ ID NO:1518), DOM10-176-25 (SEQ ID NO:1519), DOM10-176-26 (SEQ ID NO:1520), DOM10-176-27 (SEQ ID NO:1521), DOM10-176-28 (SEQ ID NO:1522), DOM10-176-29 (SEQ ID NO:1523), DOM10-176-30 (SEQ ID NO:1524), DOM10-176-31 (SEQ ID NO:1525), DOM10-176-32 (SEQ ID NO:1526), DOM10-176-33 (SEQ ID NO:1527), DOM10-176-34 (SEQ ID NO:1528), DOM10-176-35 (SEQ ID NO:1529), DOM10-176-36 (SEQ ID NO:1530), DOM10-176-37 (SEQ ID NO:1531), DOM10-176-38 (SEQ ID NO:1532), DOM10-176-39 (SEQ ID NO:1533), DOM10-176-40 (SEQ ID NO:1534), DOM10-176-101 (SEQ ID NO:1535), DOM10-176-102 (SEQ ID NO:1536), DOM10-176-103 (SEQ ID NO:1537), DOM10-176-104 (SEQ ID NO:1538), DOM10-176-105 (SEQ ID NO:1539), DOM10-176-106 (SEQ ID NO:1540), DOM10-176-107 (SEQ ID NO:1541), DOM10-176-108 (SEQ ID NO:1542), DOM10-176-109 (SEQ ID NO:1543), DOM10-176-110 (SEQ ID NO:1544), DOM10-176-111 (SEQ ID NO:1545), DOM10-176-112 (SEQ ID NO:1546), DOM10-176-113 (SEQ ID NO:1547), DOM10-176-114 (SEQ ID NO:1548), DOM10-176-115 (SEQ ID NO:1549), DOM10-176-116 (SEQ ID NO:1550), DOM10-176-117 (SEQ ID NO:1551), DOM10-176-500 (SEQ ID NO:1552), DOM10-176-501 (SEQ ID NO:1553), DOM10-176-502 (SEQ ID NO:1554), DOM10-176-503 (SEQ ID NO:1555), DOM10-176-504 (SEQ ID NO:1556), DOM10-176-505 (SEQ ID NO:1557), DOM10-176-506 (SEQ ID NO:1558), DOM10-176-507 (SEQ ID NO:1559), DOM10-176-508 (SEQ ID NO:1560), DOM10-176-509 (SEQ ID NO:1561), DOM10-176-510 (SEQ ID NO:1562), DOM10-176-511 (SEQ ID NO:1563), DOM10-176-512 (SEQ ID NO:1564), DOM10-176-513 (SEQ ID NO:1565), DOM10-176-514 (SEQ ID NO:1566), DOM10-176-515 (SEQ ID NO:1567), DOM10-176-516 (SEQ ID NO:1568), DOM10-176-517 (SEQ ID NO:1569), DOM10-176-518 (SEQ ID NO:1570), DOM10-176-519 (SEQ ID NO:1571), DOM10-176-520 (SEQ ID NO:1572), DOM10-176-521 (SEQ ID NO:1573), DOM10-176-522 (SEQ ID NO:1574), DOM10-176-523 (SEQ ID NO:1575), DOM10-176-524 (SEQ ID NO:1576), DOM10-176-525 (SEQ ID NO:1577), DOM10-176-526 (SEQ ID NO:1578), DOM10-176-527 (SEQ ID NO:1579), DOM10-176-528 (SEQ ID NO:1580), DOM10-176-529 (SEQ ID NO:1581), DOM10-176-530 (SEQ ID NO:1582), DOM10-176-531 (SEQ ID NO:1583), DOM10-176-532 (SEQ ID NO:1584), DOM10-176-533 (SEQ ID NO:1585), DOM10-176-534 (SEQ ID NO:1586), DOM10-176-535 (SEQ ID NO:1587), DOM10-176-536 (SEQ ID NO:1588), DOM10-176-537 (SEQ ID NO:1589), DOM10-176-538 (SEQ ID NO:1590), DOM10-176-539 (SEQ ID NO:1591), DOM10-176-540 (SEQ ID NO:1592), DOM10-176-541 (SEQ ID NO:1593), DOM10-176-542 (SEQ ID NO:1594), DOM10-176-543 (SEQ ID NO:1595), DOM10-176-544 (SEQ ID NO:1596), DOM10-176-545 (SEQ ID NO:1597), DOM10-176-546 (SEQ ID NO:1598), DOM10-176-547 (SEQ ID NO:1599), DOM10-176-548 (SEQ ID NO:1600), DOM10-176-549 (SEQ ID NO:1601), DOM10-176-550 (SEQ ID NO:1602), DOM10-176-551 (SEQ ID NO:1603), DOM10-176-552 (SEQ ID NO:1604), DOM10-176-553 (SEQ ID NO:1605), DOM10-176-554 (SEQ ID NO:1606), DOM10-176-555 (SEQ ID NO:1607), DOM10-176-556 (SEQ ID NO:1608), DOM10-176-557 (SEQ ID NO:1609), DOM10-176-558 (SEQ ID NO:1610), DOM10-176-559 (SEQ ID NO:1611), DOM10-176-560 (SEQ ID NO:1612), DOM10-176-561 (SEQ ID NO:1613), DOM10-176-562 (SEQ ID NO:1614), DOM10-176-563 (SEQ ID NO:1615), DOM10-176-564 (SEQ ID NO:1616), DOM10-176-565 (SEQ ID NO:1617), DOM10-176-566 (SEQ ID NO:1618), DOM10-176-567 (SEQ ID NO:1619), DOM10-176-568 (SEQ ID NO:1620), DOM10-176-569 (SEQ ID NO:1621), DOM10-176-570 (SEQ ID NO:1622), DOM10-176-571 (SEQ ID NO:1623), DOM10-176-572 (SEQ ID NO:1624), DOM10-176-573 (SEQ ID NO:1625), DOM10-176-574 (SEQ ID NO:1626), DOM10-176-575 (SEQ ID NO:1627), DOM10-176-576 (SEQ ID NO:1628), DOM10-176-577 (SEQ ID NO:1629), DOM10-176-578 (SEQ ID NO:1630), DOM10-176-579 (SEQ ID NO:1631), DOM10-176-580 (SEQ ID NO:1632), DOM10-176-581 (SEQ ID NO:1633), DOM10-176-582 (SEQ ID NO:1634), DOM10-176-583 (SEQ ID NO:1635), DOM10-176-584 (SEQ ID NO:1636), DOM10-176-585 (SEQ ID NO:1637), DOM10-176-586 (SEQ ID NO:1638), DOM10-176-587 (SEQ ID NO:1639), DOM10-176-588 (SEQ ID NO:1640), DOM10-176-589 (SEQ ID NO:1641), DOM10-176-590 (SEQ ID NO:1642), DOM10-176-591 (SEQ ID NO:1643), DOM10-176-592 (SEQ ID NO:1644), DOM10-176-593 (SEQ ID NO:1645), DOM10-176-594 (SEQ ID NO:1646), DOM10-176-595 (SEQ ID NO:1647), DOM10-176-596 (SEQ ID NO:1648), DOM10-176-597 (SEQ ID NO:1649), DOM10-176-598 (SEQ ID NO:1650), DOM10-176-599 (SEQ ID NO:1651), DOM10-176-600 (SEQ ID NO:1652), DOM10-176-601 (SEQ ID NO:1653), DOM10-176-602 (SEQ ID NO:1654), DOM10-176-603 (SEQ ID NO:1655), DOM10-176-604 (SEQ ID NO:1656), DOM10-176-605 (SEQ ID NO:1657), DOM10-176-606 (SEQ ID NO:1658), DOM10-176-607 (SEQ ID NO:1659), DOM10-176-608 (SEQ ID NO:1660), DOM10-176-609 (SEQ ID NO:1661), DOM10-176-610 (SEQ ID NO:1662), DOM10-176-611 (SEQ ID NO:1663), DOM10-176-612 (SEQ ID NO:1664), DOM10-176-613 (SEQ ID NO:1665), DOM10-176-614 (SEQ ID NO:1666), DOM10-176-615 (SEQ ID NO:1667), DOM10-176-616 (SEQ ID NO:1668), DOM10-176-617 (SEQ ID NO:1669), DOM10-176-618 (SEQ ID NO:1670), DOM10-176-619 (SEQ ID NO:1671), DOM10-176-620 (SEQ ID NO:1672), DOM10-176-621 (SEQ ID NO:1673), DOM10-176-622 (SEQ ID NO:1674), DOM10-176-623 (SEQ ID NO:1675), DOM10-176-624 (SEQ ID NO:1676), DOM10-176-625 (SEQ ID NO:1677), DOM10-176-626 (SEQ ID NO:1678), DOM10-176-627 (SEQ ID NO:1679), DOM10-176-628 (SEQ ID NO:1680), DOM10-176-629 (SEQ ID NO:1681), DOM10-176-630 (SEQ ID NO:1682), DOM10-176-631 (SEQ ID NO:1683), DOM10-176-632 (SEQ ID NO:1684), DOM10-176-633 (SEQ ID NO:1685), DOM10-176-634 (SEQ ID NO:1686), DOM10-176-635 (SEQ ID NO:1687), DOM10-176-636 (SEQ ID NO:1688), DOM10-176-637 (SEQ ID NO:1689), DOM10-176-638 (SEQ ID NO:1690), DOM10-176-639 (SEQ ID NO:1691), DOM10-176-640 (SEQ ID NO:1692), DOM10-176-641 (SEQ ID NO:1693), DOM10-176-643 (SEQ ID NO:1694), DOM10-176-644 (SEQ ID NO:1695), DOM10-176-645 (SEQ ID NO:1696), DOM10-176-646 (SEQ ID NO:1697), DOM10-176-647 (SEQ ID NO:1698), DOM10-176-648 (SEQ ID NO:1699), DOM10-176-649 (SEQ ID NO:1700), DOM10-176-650 (SEQ ID NO:1701), DOM10-176-651 (SEQ ID NO:1702), DOM10-176-652 (SEQ ID NO:1703), DOM10-176-653 (SEQ ID NO:1704), DOM10-176-654 (SEQ ID NO:1705), DOM10-176-655 (SEQ ID NO:1706), DOM10-176-656 (SEQ ID NO:1707), DOM10-176-657 (SEQ ID NO:1708), DOM10-176-658 (SEQ ID NO:1709), DOM10-176-659 (SEQ ID NO:1710), DOM10-176-660 (SEQ ID NO:1711), DOM10-176-661 (SEQ ID NO:1712), DOM10-176-662 (SEQ ID NO:1713), DOM10-176-663 (SEQ ID NO:1714), DOM10-176-664 (SEQ ID NO:1715), DOM10-176-665 (SEQ ID NO:1716), DOM10-176-666 (SEQ ID NO:1717), DOM10-176-667 (SEQ ID NO:1718), DOM10-176-668 (SEQ ID NO:1719), DOM10-176-669 (SEQ ID NO:1720), DOM10-176-670 (SEQ ID NO:1721), DOM10-176-671 (SEQ ID NO:1722), DOM10-176-672 (SEQ ID NO:1723), DOM10-176-673 (SEQ ID NO:1724), DOM10-176-674 (SEQ ID NO:1725), DOM10-176-675 (SEQ ID NO:1726), DOM10-253 (SEQ ID NO:1727), DOM10-255 (SEQ ID NO:1728), DOM10-272 (SEQ ID NO:1729), DOM10-307 (SEQ ID NO:1730), DOM10-319 (SEQ ID NO:1731) and DOM10-319-1 (SEQ ID NO:1732).

[0249] In some embodiments, a polypeptide domain that has a binding site with binding specificity for IL-13 competes for binding to IL-13 with a dAb selected from the group consisting of DOM10-236 (SEQ ID NO:2129), DOM10-238 (SEQ ID NO:2130), DOM10-241 (SEQ ID NO:2131), DOM10-245 (SEQ ID NO:2132), DOM10-249 (SEQ ID NO:2133), DOM10-250 (SEQ ID NO:2134), DOM10-251 (SEQ ID NO:2135), DOM10-254 (SEQ ID NO:2136), DOM10-256 (SEQ ID NO:2137), DOM10-259 (SEQ ID NO:2138), DOM10-260 (SEQ ID NO:2139), DOM10-261 (SEQ ID NO:2140), DOM10-263 (SEQ ID NO:2141), DOM10-264 (SEQ ID NO:2142), DOM10-273 (SEQ ID NO:2143), DOM10-278 (SEQ ID NO:2144), DOM10-279 (SEQ ID NO:2145), DOM10-281 (SEQ ID NO:2146), DOM10-282 (SEQ ID NO:2147), DOM10-283 (SEQ ID NO:2148), DOM10-400 (SEQ ID NO:2149), DOM10-401 (SEQ ID NO:2150), DOM10-402 (SEQ ID NO:2151), DOM10-404 (SEQ ID NO:2152), DOM10-406 (SEQ ID NO:2153), DOM10-407 (SEQ ID NO:2154), DOM10-409 (SEQ ID NO:2155), DOM10-410 (SEQ ID NO:2156), DOM10-414 (SEQ ID NO:2157), DOM10-415 (SEQ ID NO:2158), DOM10-416 (SEQ ID NO:2159), DOM10-418 (SEQ ID NO:2160), DOM10-420 (SEQ ID NO:2161), DOM10-422 (SEQ ID NO:2162), DOM10-423 (SEQ ID NO:2163), DOM10-424 (SEQ ID NO:2164), DOM10-425 (SEQ ID NO:2165), DOM10-426 (SEQ ID NO:2166), DOM10-427 (SEQ ID NO:2167), DOM10-428 (SEQ ID NO:2168), DOM10-429 (SEQ ID NO:2169), DOM10-430 (SEQ ID NO:2170), DOM10-431 (SEQ ID NO:2171), DOM10-432 (SEQ ID NO:2172), DOM10-433 (SEQ ID NO:2173), DOM10-467 (SEQ ID NO:2174), DOM10-468 (SEQ ID NO:2175), DOM10-469 (SEQ ID NO:2176), DOM10-470 (SEQ ID NO:2177), DOM10-234 (SEQ ID NO:2178), DOM10-235 (SEQ ID NO:2179), DOM10-237 (SEQ ID NO:2180), DOM10-239 (SEQ ID NO:2181), DOM10-240 (SEQ ID NO:2182), DOM10-242 (SEQ ID NO:2183), DOM10-243 (SEQ ID NO:2184), DOM10-244 (SEQ ID NO:2185), DOM10-246 (SEQ ID NO:2186), DOM10-247 (SEQ ID NO:2187), DOM10-248 (SEQ ID NO:2188), DOM10-252 (SEQ ID NO:2189), DOM10-257 (SEQ ID NO:2190), DOM10-258 (SEQ ID NO:2191), DOM10-262 (SEQ ID NO:2192), DOM10-265 (SEQ ID NO:2193), DOM10-266 (SEQ ID NO:2194), DOM10-274 (SEQ ID NO:2195), DOM10-275 (SEQ ID NO:2196), DOM10-276 (SEQ ID NO:2197), DOM10-277 (SEQ ID NO:2198), DOM10-280 (SEQ ID NO:2199), DOM10-403 (SEQ ID NO:2200), DOM10-405 (SEQ ID NO:2201), DOM10-408 (SEQ ID NO:2202), DOM10-411 (SEQ ID NO:2203), DOM10-412 (SEQ ID NO:2204), DOM10-413 (SEQ ID NO:2205), DOM10-417 (SEQ ID NO:2206), DOM10-419 (SEQ ID NO:2207), DOM10-472 (SEQ ID NO:2208), DOM10-203 (SEQ ID NO:2209), DOM10-205 (SEQ ID NO:2210), DOM10-208 (SEQ ID NO:2211), DOM10-218 (SEQ ID NO:2212), DOM10-219 (SEQ ID NO:2213), DOM10-220 (SEQ ID NO:2214), DOM10-225 (SEQ ID NO:2215), DOM10-228 (SEQ ID NO:2216), DOM10-229 (SEQ ID NO:2217), DOM10-230 (SEQ ID NO:2218), DOM10-231 (SEQ ID NO:2219), DOM10-268 (SEQ ID NO:2220), DOM10-201 (SEQ ID NO:2221), DOM10-202 (SEQ ID NO:2222), DOM10-204 (SEQ ID NO:2223), DOM10-206 (SEQ ID NO:2224), DOM10-207 (SEQ ID NO:2225), DOM10-209 (SEQ ID NO:2226), DOM10-210 (SEQ ID NO:2227), DOM10-211 (SEQ ID NO:2228), DOM10-213 (SEQ ID NO:2229), DOM10-214 (SEQ ID NO:2230), DOM10-215 (SEQ ID NO:2231), DOM10-216 (SEQ ID NO:2232), DOM10-217 (SEQ ID NO:2233), DOM10-221 (SEQ ID NO:2234), DOM10-223 (SEQ ID NO:2235), DOM10-224 (SEQ ID NO:2236), DOM10-227 (SEQ ID NO:2237), DOM10-232 (SEQ ID NO:2238), DOM10-267 (SEQ ID NO:2239), DOM10-270 (SEQ ID NO:2240), DOM10-275-1 (SEQ ID NO:2241), DOM10-276-2 (SEQ ID NO:2242), DOM10-276-3 (SEQ ID NO:2243), DOM10-275-3 (SEQ ID NO:2244), DOM10-277-2 (SEQ ID NO:2245), DOM10-277-3 (SEQ ID NO:2246), DOM10-273-1 (SEQ ID NO:2247), DOM10-273-2 (SEQ ID NO:2248), DOM10-275-2 (SEQ ID NO:2249), DOM10-275-4 (SEQ ID NO:2250), DOM10-276-1 (SEQ ID NO:2251), DOM10-276-4 (SEQ ID NO:2252), DOM10-277-1 (SEQ ID NO:2253), DOM10-275-13 (SEQ ID NO:2254), DOM10-275-15 (SEQ ID NO:2255), DOM10-275-20 (SEQ ID NO:2256), DOM10-275-8 (SEQ ID NO:2257), DOM10-276-13 (SEQ ID NO:2258), DOM10-276-14 (SEQ ID NO:2259), DOM10-276-15 (SEQ ID NO:2260), DOM10-276-17 (SEQ ID NO:2261), DOM10-276-7 (SEQ ID NO:2262), DOM10-276-8 (SEQ ID NO:2263), DOM10-275-11 (SEQ ID NO:2264), DOM10-275-12 (SEQ ID NO:2265), DOM10-275-14 (SEQ ID NO:2266), DOM10-275-16 (SEQ ID NO:2267), DOM10-275-17 (SEQ ID NO:2268), DOM10-275-5 (SEQ ID NO:2269), DOM10-275-6 (SEQ ID NO:2270), DOM10-275-7 (SEQ ID NO:2271), DOM10-275-9 (SEQ ID NO:2272), DOM10-276-10 (SEQ ID NO:2273), DOM10-276-11 (SEQ ID NO:2274), DOM10-276-12 (SEQ ID NO:2275), DOM10-276-16 (SEQ ID NO:2276), DOM10-276-5 (SEQ ID NO:2277), DOM10-276-6 (SEQ ID NO:2278), DOM10-276-9 (SEQ ID NO:2279), DOM10-212 (SEQ ID NO:2280), DOM10-53-424 (SEQ ID NO:2281), DOM10-53-425 (SEQ ID NO:2282), DOM10-53-426 (SEQ ID NO:2283), DOM10-53-422 (SEQ ID NO:2284), DOM10-53-423 (SEQ ID NO:2285), DOM10-53-613 (SEQ ID NO:2286), DOM10-53-517 (SEQ ID NO:2287), DOM10-53-519 (SEQ ID NO:2288), DOM10-53-520 (SEQ ID NO:2289), DOM10-53-521 (SEQ ID NO:2290), DOM10-53-522 (SEQ ID NO:2291), DOM10-53-526 (SEQ ID NO:2292), DOM10-53-527 (SEQ ID NO:2293), DOM10-53-528 (SEQ ID NO:2294), DOM10-53-518 (SEQ ID NO:2295), DOM10-53-523 (SEQ ID NO:2296), DOM10-53-524 (SEQ ID NO:2297), DOM10-53-525 (SEQ ID NO:2298), DOM10-53-601 (SEQ ID NO:2299), DOM10-53-602 (SEQ ID NO:2300), DOM10-53-605 (SEQ ID NO:2301), DOM10-53-606 (SEQ ID NO:2302), DOM10-53-607 (SEQ ID NO:2303), DOM10-53-608 (SEQ ID NO:2304), DOM10-53-609 (SEQ ID NO:2305), DOM10-53-610 (SEQ ID NO:2306), DOM10-53-611 (SEQ ID NO:2307), DOM10-53-612 (SEQ ID NO:2308), DOM10-53-603 (SEQ ID NO:2309), DOM10-53-604 (SEQ ID NO:2310), DOM10-53-429 (SEQ ID NO:2311), DOM10-53-432 (SEQ ID NO:2312), DOM10-53-433 (SEQ ID NO:2313), DOM10-53-435 (SEQ ID NO:2314), DOM10-53-430 (SEQ ID NO:2315), DOM10-53-431 (SEQ ID NO:2316), DOM10-53-434 (SEQ ID NO:2317), DOM10-53-436 (SEQ ID NO:2318), DOM10-53-437 (SEQ ID NO:2319), DOM10-53-438 (SEQ ID NO:2320), DOM10-53-440 (SEQ ID NO:2321), DOM10-53-439 (SEQ ID NO:2322), DOM10-53-441 (SEQ ID NO:2323), DOM10-53-442 (SEQ ID NO:2324), DOM10-53-443 (SEQ ID NO:2325), DOM10-53-444 (SEQ ID NO:2326), DOM10-53-445 (SEQ ID NO:2327), DOM10-53-446 (SEQ ID NO:2328), DOM10-53-447 (SEQ ID NO:2329), DOM10-53-449 (SEQ ID NO:2330), DOM10-53-448 (SEQ ID NO:2331), DOM10-53-450 (SEQ ID NO:2332), DOM10-53-451 (SEQ ID NO:2333), DOM10-53-452 (SEQ ID NO:2334), DOM10-53-453 (SEQ ID NO:2335), DOM10-53-454 (SEQ ID NO:2336), DOM10-53-455 (SEQ ID NO:2337), DOM10-53-456 (SEQ ID NO:2338), DOM10-53-457 (SEQ ID NO:2339), DOM10-53-458 (SEQ ID NO:2340), DOM10-53-459 (SEQ ID NO:2341), DOM10-53-461 (SEQ ID NO:2342), DOM10-53-462 (SEQ ID NO:2343), DOM10-53-465 (SEQ ID NO:2344), DOM10-53-466 (SEQ ID NO:2345), DOM10-53-467 (SEQ ID NO:2346), DOM10-53-468 (SEQ ID NO:2347), DOM10-53-460 (SEQ ID NO:2348), DOM10-53-463 (SEQ ID NO:2349), DOM10-53-464 (SEQ ID NO:2350), DOM10-53-469 (SEQ ID NO:2351), DOM10-53-471 (SEQ ID NO:2352), DOM10-53-470 (SEQ ID NO:2353), DOM10-53-533 (SEQ ID NO:2354), DOM10-53-534 (SEQ ID NO:2355), DOM10-53-535 (SEQ ID NO:2356), DOM10-53-537 (SEQ ID NO:2357), DOM10-53-538 (SEQ ID NO:2358), DOM10-53-539 (SEQ ID NO:2359), DOM10-53-540 (SEQ ID NO:2360), DOM10-53-531 (SEQ ID NO:2361), DOM10-53-532 (SEQ ID NO:2362), DOM10-53-536 (SEQ ID NO:2363), DOM10-53-542 (SEQ ID NO:2364), DOM10-53-541 (SEQ ID NO:2365), DOM10-53-473 (SEQ ID NO:2366), DOM10-53-472 (SEQ ID NO:2367), DOM10-53-475 (SEQ ID NO:2368), DOM10-53-474 (SEQ ID NO:2369), DOM10-53-543 (SEQ ID NO:2370), DOM10-53-544 (SEQ ID NO: 2371), DOM10-53-545 (SEQ ID NO:2372), DOM10-53-548 (SEQ ID NO:2373), DOM10-53-546 (SEQ ID NO:2374), DOM10-53-549 (SEQ ID NO:2375), DOM10-53-547 (SEQ ID NO:2376), DOM10-53-550 (SEQ ID NO:2377), DOM10-53-551 (SEQ ID NO:2378), DOM10-53-560 (SEQ ID NO:2379), DOM10-53-565 (SEQ ID NO:2380), DOM10-53-559 (SEQ ID NO:2381), DOM10-53-561 (SEQ ID NO:2382), DOM10-53-562 (SEQ ID NO:2383), DOM10-53-563 (SEQ ID NO:2384), DOM10-53-564 (SEQ ID NO:2385), DOM10-53-566 (SEQ ID NO:2386), DOM10-53-554 (SEQ ID NO:2387), DOM10-53-552 (SEQ ID NO:2388), DOM10-53-553 (SEQ ID NO:2389), DOM10-53-558 (SEQ ID NO:2390), DOM10-53-556 (SEQ ID NO:2391) and DOM10-53-557 (SEQ ID NO:2392).

[0250] In some embodiments, a polypeptide domain that has a binding site with binding specificity for IL-13 competes for binding to IL-13 with a dAb selected from the group consisting of DOM10-53-474 (SEQ ID NO:2369), DOM10-275-78 (SEQ ID NO:2456), DOM10-275-94 (SEQ ID NO:2457), DOM10-275-99 (SEQ ID NO:2458), DOM10-275-100 (SEQ ID NO:2459) and DOM10-275-101 (SEQ ID NO:2460). For example, the binding of the polypeptide domain that has a binding site with binding specificity for IL-13 to IL-13 is inhibited by a dAb selected from the group consisting of DOM10-53-474 (SEQ ID NO:2369), DOM10-275-78 (SEQ ID NO:2456), DOM10-275-94 (SEQ ID NO:2457), DOM10-275-99 (SEQ ID NO:2458), DOM10-275-100 (SEQ ID NO:2459) and DOM10-275-101 (SEQ ID NO:2460). In other examples, the polypeptide domain that has a binding site with binding specificity for IL-13 has the epitopic specificity of a dAb selected from the group consisting of DOM10-53-474 (SEQ ID NO:2369), DOM10-275-78 (SEQ ID NO:2456), DOM10-275-94 (SEQ ID NO:2457), DOM10-275-99 (SEQ ID NO:2458), DOM10-275-100 (SEQ ID NO:2459) and DOM10-275-101 (SEQ ID NO:2460).

[0251] In some embodiments, the polypeptide domain that has a binding site with binding specificity for IL-13 (e.g., a dAb) comprises an amino acid sequence that has at least about 80%, at least about 85%, at least about 90%, at least about 91%, at least about 92%, at least about 93%, at least about 94%, at least about 95%, at least about 96%, at least about 97%, at least about 98%, or at least about 99% amino acid sequence identity with the amino acid sequence or a dAb selected from the group consisting of DOM10-53 (SEQ ID NO:967), DOM10-53-1 (SEQ ID NO:968), DOM10-53-2 (SEQ ID NO:969), DOM10-53-3 (SEQ ID NO:970), DOM10-53-4 (SEQ ID NO:971), DOM10-53-5 (SEQ ID NO:972), DOM10-53-6 (SEQ ID NO:973), DOM10-53-7 (SEQ ID NO:974), DOM10-53-8 (SEQ ID NO:975), DOM10-53-9 (SEQ ID NO:976), DOM10-53-10 (SEQ ID NO:977), DOM10-53-11 (SEQ ID NO:978), DOM10-53-12 (SEQ ID NO:979), DOM10-53-13 (SEQ ID NO:980), DOM10-53-14 (SEQ ID NO:981), DOM10-53-15 (SEQ ID NO:982), DOM10-53-16 (SEQ ID NO:983), DOM10-53-17 (SEQ ID NO:984), DOM10-53-18 (SEQ ID NO:985), DOM10-53-19 (SEQ ID NO:986), DOM10-53-20 (SEQ ID NO:987), DOM10-53-21 (SEQ ID NO:988), DOM10-53-122 (SEQ ID NO:989), DOM10-53-123 (SEQ ID NO:990), DOM10-53-24 (SEQ ID NO:991), DOM10-53-25 (SEQ ID NO:992), DOM10-53-26 (SEQ ID NO:993), DOM10-53-27 (SEQ ID NO:994), DOM10-53-28 (SEQ ID NO:995), DOM10-53-29 (SEQ ID NO:996), DOM10-53-30 (SEQ ID NO:997), DOM10-53-31 (SEQ ID NO:998), DOM10-53-32 (SEQ ID NO:1999), DOM10-53-43 (SEQ ID NO:1000), DOM10-53-44 (SEQ ID NO:1001), DOM10-53-45 (SEQ ID NO:1002), DOM10-53-46 (SEQ ID NO:1003), DOM10-53-47 (SEQ ID NO:1004), DOM10-53-48 (SEQ ID NO:1005), DOM10-53-49 (SEQ ID NO:1006), DOM10-53-50 (SEQ ID NO:1007), DOM10-53-51 (SEQ ID NO:1008), DOM10-53-52 (SEQ ID NO:1009), DOM10-53-53 (SEQ ID NO:1010), DOM10-53-54 (SEQ ID NO:1011), DOM10-53-55 (SEQ ID NO:1012), DOM10-53-56 (SEQ ID NO:1013), DOM10-53-57 (SEQ ID NO:1014), DOM10-53-59 (SEQ ID NO:1015), DOM10-53-60 (SEQ ID NO:1016), DOM10-53-61 (SEQ ID NO:1017), DOM10-53-62 (SEQ ID NO:1018), DOM10-53-63 (SEQ ID NO:1019), DOM10-53-64 (SEQ ID NO:1020), DOM10-53-65 (SEQ ID NO:1021), DOM10-53-66 (SEQ ID NO:1022), DOM10-53-67 (SEQ ID NO:1023), DOM10-53-68 (SEQ ID NO:1024), DOM10-53-69 (SEQ ID NO:1025), DOM10-53-70 (SEQ ID NO:1026), DOM10-53-71 (SEQ ID NO:1027), DOM10-53-72 (SEQ ID NO:1028), DOM10-53-73 (SEQ ID NO:1029), DOM10-53-74 (SEQ ID NO:1030), DOM10-53-75 (SEQ ID NO:1031), DOM10-53-76 (SEQ ID NO:1032), DOM10-53-77 (SEQ ID NO:1033), DOM10-53-78 (SEQ ID NO:1034), DOM10-53-79 (SEQ ID NO:1035), DOM10-53-80 (SEQ ID NO:1036), DOM10-53-81 (SEQ ID NO:1037), DOM10-53-82 (SEQ ID NO:1038), DOM10-53-83 (SEQ ID NO:1039), DOM10-53-84 (SEQ ID NO:1040), DOM10-53-85 (SEQ ID NO:1041), DOM10-53-86 (SEQ ID NO:1042), DOM10-53-87 (SEQ ID NO:1043), DOM10-53-88 (SEQ ID NO:1044), DOM10-53-89 (SEQ ID NO:1045), DOM10-53-91 (SEQ ID NO:1046), DOM10-53-92 (SEQ ID NO:1047), DOM10-53-93 (SEQ ID NO:1048), DOM10-53-94 (SEQ ID NO:1049), DOM10-53-95 (SEQ ID NO:1050), DOM10-53-96 (SEQ ID NO:1051), DOM10-53-97 (SEQ ID NO:1052), DOM10-53-98 (SEQ ID NO:1053), DOM10-53-99 (SEQ ID NO:1054), DOM10-53-100 (SEQ ID NO:1055), DOM10-53-103 (SEQ ID NO:1056), DOM10-53-105 (SEQ ID NO:1057), DOM10-53-106 (SEQ ID NO:1058), DOM10-53-108 (SEQ ID NO:1059), DOM10-53-110 (SEQ ID NO:1060), DOM10-53-111 (SEQ ID NO:1061), DOM10-53-112 (SEQ ID NO:10632), DOM10-53-114 (SEQ ID NO:1063), DOM10-53-115 (SEQ ID NO:1064), DOM10-53-116 (SEQ ID NO:1065), DOM10-53-117 (SEQ ID NO:1066), DOM10-53-119 (SEQ ID NO:1067), DOM10-53-120 (SEQ ID NO:1068), DOM10-53-122 (SEQ ID NO:1069), DOM10-53-201 (SEQ ID NO:1070), DOM10-53-203 (SEQ ID NO:1071), DOM10-53-204 (SEQ ID NO:1072), DOM10-53-205 (SEQ ID NO:1073), DOM10-53-206 (SEQ ID NO:1074), DOM10-53-207 (SEQ ID NO:1075), DOM10-53-208 (SEQ ID NO:1076), DOM10-53-209 (SEQ ID NO:1077), DOM10-53-210 (SEQ ID NO:1078), DOM10-53-211 (SEQ ID NO:1079), DOM10-53-213 (SEQ ID NO:1080), DOM10-53-214 (SEQ ID NO:1081), DOM10-53-215 (SEQ ID NO:1082), DOM10-53-216 (SEQ ID NO:1083), DOM10-53-217 (SEQ ID NO:1084), DOM10-53-1218 (SEQ ID NO:1085), DOM10-53-219 (SEQ ID NO:1086), DOM10-53-220 (SEQ ID NO:1087), DOM10-53-221 (SEQ ID NO:1088), DOM10-53-222 (SEQ ID NO:1089), DOM10-53-223 (SEQ ID NO:1090), DOM10-53-224 (SEQ ID NO:1091), DOM10-53-225 (SEQ ID NO:1092), DOM10-53-226 (SEQ ID NO:1093), DOM10-53-227 (SEQ ID NO:1094), DOM10-53-228 (SEQ ID NO:1095), DOM10-53-229 (SEQ ID NO:1096), DOM10-53-230 (SEQ ID NO:1097), DOM10-53-231 (SEQ ID NO:1098), DOM10-53-232 (SEQ ID NO:1099), DOM10-53-233 (SEQ ID NO:1100), DOM10-53-234 (SEQ ID NO:1101), DOM10-53-235 (SEQ ID NO:1102), DOM10-53-236 (SEQ ID NO:1103), DOM10-53-237 (SEQ ID NO:1104), DOM10-53-238 (SEQ ID NO:1105), DOM10-53-239 (SEQ ID NO:1106), DOM10-53-240 (SEQ ID NO:1107), DOM10-53-241 (SEQ ID NO:1108), DOM10-53-242 (SEQ ID NO:1109), DOM10-53-243 (SEQ ID NO:1110), DOM10-53-244 (SEQ ID NO:1111), DOM10-53-245 (SEQ ID NO:1112), DOM10-53-246 (SEQ ID NO:1113), DOM10-53-247 (SEQ ID NO:1114), DOM10-53-248 (SEQ ID NO:1115), DOM10-53-249 (SEQ ID NO:1116), DOM10-53-250 (SEQ ID NO:1117), DOM10-53-251 (SEQ ID NO:1118), DOM10-53-252 (SEQ ID NO:1119), DOM10-53-253 (SEQ ID NO:1120), DOM10-53-254 (SEQ ID NO:1121), DOM10-53-255 (SEQ ID NO:1122), DOM10-53-256 (SEQ ID NO:1123), DOM10-53-257 (SEQ ID NO:1124), DOM10-53-258 (SEQ ID NO:1125), DOM10-53-259 (SEQ ID NO:1126), DOM10-53-260 (SEQ ID NO:1127), DOM10-53-261 (SEQ ID NO:1128), DOM10-53-262 (SEQ ID NO:1129), DOM10-53-263 (SEQ ID NO:1130), DOM10-53-264 (SEQ ID NO:1131), DOM10-53-265 (SEQ ID NO:1132), DOM10-53-266 (SEQ ID NO:1133), DOM10-53-267 (SEQ ID NO:1134), DOM10-53-268 (SEQ ID NO:1135), DOM10-53-269 (SEQ ID NO:1136), DOM10-53-270 (SEQ ID NO:1137), DOM10-53-271 (SEQ ID NO:1138), DOM10-53-272 (SEQ ID NO:1139), DOM10-53-273 (SEQ ID NO:1140), DOM10-53-274 (SEQ ID NO:1141), DOM10-53-275 (SEQ ID NO:1142), DOM10-53-276 (SEQ ID NO:1143), DOM10-53-277 (SEQ ID NO:1144), DOM10-53-278 (SEQ ID NO:1145), DOM10-53-279 (SEQ ID NO:1146), DOM10-53-280 (SEQ ID NO:1147), DOM10-53-281 (SEQ ID NO:1148), DOM10-53-282 (SEQ ID NO:1149), DOM10-53-283 (SEQ ID NO:1150), DOM10-53-284 (SEQ ID NO:1151), DOM10-53-285 (SEQ ID NO:1152), DOM10-53-286 (SEQ ID NO:1153), DOM10-53-287 (SEQ ID NO:1154), DOM10-53-288 (SEQ ID NO:1155), DOM10-53-289 (SEQ ID NO:1156), DOM10-53-290 (SEQ ID NO:1157), DOM10-53-291 (SEQ ID NO:1158), DOM10-53-292 (SEQ ID NO:1159), DOM10-53-293 (SEQ ID NO:1160), DOM10-53-294 (SEQ ID NO:1161), DOM10-53-295 (SEQ ID NO:1162), DOM10-53-296 (SEQ ID NO:1163), DOM10-53-297 (SEQ ID NO:1164), DOM10-53-298 (SEQ ID NO:1165), DOM10-53-299 (SEQ ID NO:1166), DOM10-53-300 (SEQ ID NO:1167), DOM10-53-301 (SEQ ID NO:1168), DOM10-53-302 (SEQ ID NO:1169), DOM10-53-303 (SEQ ID NO:1170), DOM10-53-304 (SEQ ID NO:1171), DOM10-53-305 (SEQ ID NO:1172), DOM10-53-306 (SEQ ID NO:1173), DOM10-53-307 (SEQ ID NO:1174), DOM10-53-308 (SEQ ID NO:1175), DOM10-53-309 (SEQ ID NO:1176), DOM10-53-310 (SEQ ID NO:11787), DOM10-53-311 (SEQ ID NO:1178), DOM10-53-312 (SEQ ID NO:1179), DOM10-53-314 (SEQ ID NO:1180), DOM10-53-315 (SEQ ID NO:1181), DOM10-53-316 (SEQ ID NO:1182), DOM10-53-317 (SEQ ID NO:1183), DOM10-53-318 (SEQ ID NO:1184), DOM10-53-319 (SEQ ID NO:1185), DOM10-53-320 (SEQ ID NO:1186), DOM10-53-321 (SEQ ID NO:1187), DOM10-53-322 (SEQ ID NO:1188), DOM10-53-323 (SEQ ID NO:1189), DOM10-53-324 (SEQ ID NO:1190), DOM10-53-325 (SEQ ID NO:1191), DOM10-53-326 (SEQ ID NO:1192), DOM10-53-327 (SEQ ID NO:1193), DOM10-53-328 (SEQ ID NO:1194), DOM10-53-329 (SEQ ID NO:1195), DOM10-53-330 (SEQ ID NO:1196), DOM10-53-331 (SEQ ID NO:1197), DOM10-53-333 (SEQ ID NO:1198), DOM10-53-334 (SEQ ID NO:1199), DOM10-53-336 (SEQ ID NO:1200), DOM10-53-337 (SEQ ID NO:1201), DOM10-53-338 (SEQ ID NO:1202), DOM10-53-339 (SEQ ID NO:1203), DOM10-53-340 (SEQ ID NO:1204), DOM10-53-341 (SEQ ID NO:1205), DOM10-53-342 (SEQ ID NO:1206), DOM10-53-343 (SEQ ID NO:1207), DOM10-53-344 (SEQ ID NO:1208), DOM10-53-345 (SEQ ID NO:1209), DOM10-53-346 (SEQ ID NO:1210), DOM10-53-347 (SEQ ID NO:1211), DOM10-53-348 (SEQ ID NO:1212), DOM10-53-349 (SEQ ID NO:1213), DOM10-53-350 (SEQ ID NO:1214), DOM10-53-351 (SEQ ID NO:1215), DOM10-53-352 (SEQ ID NO:1216), DOM10-53-353 (SEQ ID NO:1217), DOM10-53-354 (SEQ ID NO:1218), DOM10-53-355 (SEQ ID NO: 1219), DOM10-53-356 (SEQ ID NO:1220), DOM10-53-357 (SEQ ID NO:1221), DOM10-53-358 (SEQ ID NO:1222), DOM10-53-359 (SEQ ID NO:1223), DOM10-53-360 (SEQ ID NO:1224), DOM10-53-361 (SEQ ID NO:1225), DOM10-53-362 (SEQ ID NO:1226), DOM10-53-363 (SEQ ID NO:1227), DOM10-53-364 (SEQ ID NO:1228), DOM10-53-365 (SEQ ID NO:1229), DOM10-53-366 (SEQ ID NO:1230), DOM10-53-367 (SEQ ID NO:1231), DOM10-53-368 (SEQ ID NO:1232), DOM10-53-369 (SEQ ID NO:1233), DOM10-53-370 (SEQ ID NO:1234), DOM10-53-371 (SEQ ID NO:1235), DOM10-53-372 (SEQ ID NO:1236), DOM10-53-373 (SEQ ID NO:1237), DOM10-53-374 (SEQ ID NO:1238), DOM10-53-375 (SEQ ID NO:1239), DOM10-53-376 (SEQ ID NO:1240), DOM10-53-377 (SEQ ID NO:1241), DOM10-53-378 (SEQ ID NO:1242), DOM10-53-379 (SEQ ID NO:1243), DOM10-53-380 (SEQ ID NO:1244), DOM10-53-381 (SEQ ID NO:1245), DOM10-53-382 (SEQ ID NO:1246), DOM10-53-383 (SEQ ID NO:1247), DOM10-53-384 (SEQ ID NO:1248), DOM10-53-385 (SEQ ID NO:1249), DOM10-53-386 (SEQ ID NO:1250), DOM10-53-387 (SEQ ID NO:1251), DOM10-53-388 (SEQ ID NO:1252), DOM10-53-389 (SEQ ID NO:1253), DOM10-53-390 (SEQ ID NO:1254), DOM10-53-391 (SEQ ID NO:1255), DOM10-53-392 (SEQ ID NO:1256), DOM10-53-393 (SEQ ID NO:1257), DOM10-53-394 (SEQ ID NO:1258), DOM10-53-395 (SEQ ID NO:1259), DOM10-53-396 (SEQ ID NO:1260), DOM10-53-400 (SEQ ID NO:1261), DOM10-53-401 (SEQ ID NO:1262), DOM10-53-402 (SEQ ID NO:1263), DOM10-53-403 (SEQ ID NO:1264), DOM10-53-404 (SEQ ID NO:1265), DOM10-53-405 (SEQ ID NO:1266), DOM10-53-406 (SEQ ID NO:1267), DOM10-53-407 (SEQ ID NO:1268), DOM10-53-408 (SEQ ID NO:1269), DOM10-53-409 (SEQ ID NO:1270), DOM10-53-410 (SEQ ID NO:1271), DOM10-53-411 (SEQ ID NO:1272), DOM10-53-412 (SEQ ID NO:1273), DOM10-53-413 (SEQ ID NO:1274), DOM10-53-414 (SEQ ID NO:1275), DOM10-53-415 (SEQ ID NO:1276), DOM10-53-416 (SEQ ID NO:1277), DOM10-53-417 (SEQ ID NO:1278), DOM10-53-418 (SEQ ID NO:1279), DOM10-53-419 (SEQ ID NO:1280), DOM10-53-420 (SEQ ID NO:1281), DOM10-53-421 (SEQ ID NO:1282), DOM10-168 (SEQ ID NO:1508), DOM10-169 (SEQ ID NO:1509), DOM10-176 (SEQ ID NO:1510), DOM10-176-1 (SEQ ID NO:1511), DOM10-176-2 (SEQ ID NO:1512), DOM10-173 (SEQ ID NO:1513), DOM10-176-4 (SEQ ID NO:1514), DOM10-176-5 (SEQ ID NO:1515), DOM10-176-6 (SEQ ID NO:1516), DOM10-176-23 (SEQ ID NO:1517), DOM10-176-24 (SEQ ID NO:1518), DOM10-176-25 (SEQ ID NO:1519), DOM10-176-26 (SEQ ID NO:1520), DOM10-176-27 (SEQ ID NO:1521), DOM10-176-28 (SEQ ID NO:1522), DOM10-176-29 (SEQ ID NO:1523), DOM10-176-30 (SEQ ID NO:1524), DOM10-176-31 (SEQ ID NO:1525), DOM10-176-32 (SEQ ID NO:1526), DOM10-176-33 (SEQ ID NO:1527), DOM10-176-34 (SEQ ID NO:1528), DOM10-176-35 (SEQ ID NO:1529), DOM10-176-36 (SEQ ID NO:1530), DOM10-176-37 (SEQ ID NO:1531), DOM10-176-38 (SEQ ID NO:1532), DOM10-176-39 (SEQ ID NO:1533), DOM10-176-40 (SEQ ID NO:1534), DOM10-176-101 (SEQ ID NO:1535), DOM10-176-102 (SEQ ID NO:1536), DOM10-176-103 (SEQ ID NO:1537), DOM10-176-104 (SEQ ID NO:1538), DOM10-176-105 (SEQ ID NO:1539), DOM10-176-106 (SEQ ID NO:1540), DOM10-176-107 (SEQ ID NO:1541), DOM10-176-108 (SEQ ID NO:1542), DOM10-176-109 (SEQ ID NO:1543), DOM10-176-110 (SEQ ID NO:1544), DOM10-176-111 (SEQ ID NO:1545), DOM10-176-112 (SEQ ID NO:1546), DOM10-176-113 (SEQ ID NO:1547), DOM10-176-114 (SEQ ID NO:1548), DOM10-176-115 (SEQ ID NO:1549), DOM10-176-116 (SEQ ID NO:1550), DOM10-176-117 (SEQ ID NO:1551), DOM10-176-500 (SEQ ID NO:1552), DOM10-176-501 (SEQ ID NO:1553), DOM10-176-502 (SEQ ID NO:1554), DOM10-176-503 (SEQ ID NO:1555), DOM10-176-504 (SEQ ID NO:1556), DOM10-176-505 (SEQ ID NO:1557), DOM10-176-506 (SEQ ID NO:1558), DOM10-176-507 (SEQ ID NO:1559), DOM10-176-508 (SEQ ID NO:1560), DOM10-176-509 (SEQ ID NO:1561), DOM10-176-510 (SEQ ID NO:1562), DOM10-176-511 (SEQ ID NO:1563), DOM10-176-512 (SEQ ID NO:1564), DOM10-176-513 (SEQ ID NO:1565), DOM10-176-514 (SEQ ID NO:1566), DOM10-176-515 (SEQ ID NO:1567), DOM10-176-516 (SEQ ID NO:1568), DOM10-176-517 (SEQ ID NO:1569), DOM10-176-518 (SEQ ID NO:1570), DOM10-176-519 (SEQ ID NO:1571), DOM10-176-520 (SEQ ID NO:1572), DOM10-176-521 (SEQ ID NO:1573), DOM10-176-522 (SEQ ID NO:1574), DOM10-176-523 (SEQ ID NO:1575), DOM10-176-524 (SEQ ID NO:1576), DOM10-176-525 (SEQ ID NO:1577), DOM10-176-526 (SEQ ID NO:1578), DOM10-176-527 (SEQ ID NO:1579), DOM10-176-528 (SEQ ID NO:1580), DOM10-176-529 (SEQ ID NO:1581), DOM10-176-530 (SEQ ID NO:1582), DOM10-176-531 (SEQ ID NO:1583), DOM10-176-532 (SEQ ID NO:1584), DOM10-176-533 (SEQ ID NO:1585), DOM10-176-534 (SEQ ID NO:1586), DOM10-176-535 (SEQ ID NO:1587), DOM10-176-536 (SEQ ID NO:1588), DOM10-176-537 (SEQ ID NO:1589), DOM10-176-538 (SEQ ID NO:1590), DOM10-176-539 (SEQ ID NO:1591), DOM10-176-540 (SEQ ID NO:1592), DOM10-176-541 (SEQ ID NO:1593), DOM10-176-542 (SEQ ID NO:1594), DOM10-176-543 (SEQ ID NO:1595), DOM10-176-544 (SEQ ID NO:1596), DOM10-176-545 (SEQ ID NO:1597), DOM10-176-546 (SEQ ID NO:1598), DOM10-176-547 (SEQ ID NO:1599), DOM10-176-548 (SEQ ID NO:1600), DOM10-176-549 (SEQ ID NO:1601), DOM10-176-550 (SEQ ID NO:1602), DOM10-176-551 (SEQ ID NO:1603), DOM10-176-552 (SEQ ID NO:1604), DOM10-176-553 (SEQ ID NO:1605), DOM10-176-554 (SEQ ID NO:1606), DOM10-176-555 (SEQ ID NO:1607), DOM10-176-556 (SEQ ID NO:1608), DOM10-176-557 (SEQ ID NO:1609), DOM10-176-558 (SEQ ID NO:1610), DOM10-176-559 (SEQ ID NO:1611), DOM10-176-560 (SEQ ID NO:1612), DOM10-176-561 (SEQ ID NO:1613), DOM10-176-562 (SEQ ID NO:1614), DOM10-176-563 (SEQ ID NO:1615), DOM10-176-564 (SEQ ID NO:1616), DOM10-176-565 (SEQ ID NO:1617), DOM10-176-566 (SEQ ID NO:1618), DOM10-176-567 (SEQ ID NO:1619), DOM10-176-568 (SEQ ID NO:1620), DOM10-176-569 (SEQ ID NO:1621), DOM10-176-570 (SEQ ID NO:1622), DOM10-176-571 (SEQ ID NO:1623), DOM10-176-572 (SEQ ID NO:1624), DOM10-176-573 (SEQ ID NO:1625), DOM10-176-574 (SEQ ID NO:1626), DOM10-176-575 (SEQ ID NO:1627), DOM10-176-576 (SEQ ID NO:1628), DOM10-176-577 (SEQ ID NO:1629), DOM10-176-578 (SEQ ID NO:1630), DOM10-176-579 (SEQ ID NO:1631), DOM10-176-580 (SEQ ID NO:1632), DOM10-176-581 (SEQ ID NO:1633), DOM10-176-582 (SEQ ID NO:1634), DOM10-176-583 (SEQ ID NO:1635), DOM10-176-584 (SEQ ID NO:1636), DOM10-176-585 (SEQ ID NO:1637), DOM10-176-586 (SEQ ID NO:1638), DOM10-176-587 (SEQ ID NO:1639), DOM10-176-588 (SEQ ID NO:1640), DOM10-176-589 (SEQ ID NO:1641), DOM10-176-590 (SEQ ID NO:1642), DOM10-176-591 (SEQ ID NO:1643), DOM10-176-592 (SEQ ID NO:1644), DOM10-176-593 (SEQ ID NO:1645), DOM10-176-594 (SEQ ID NO:1646), DOM10-176-595 (SEQ ID NO:1647), DOM10-176-596 (SEQ ID NO:1648), DOM10-176-597 (SEQ ID NO:1649), DOM10-176-598 (SEQ ID NO:1650), DOM10-176-599 (SEQ ID NO:1651), DOM10-176-600 (SEQ ID NO:1652), DOM10-176-601 (SEQ ID NO:1653), DOM10-176-602 (SEQ ID NO:1654), DOM10-176-603 (SEQ ID NO:1655), DOM10-176-604 (SEQ ID NO:1656), DOM10-176-605 (SEQ ID NO:1657), DOM10-176-606 (SEQ ID NO:1658), DOM10-176-607 (SEQ ID NO:1659), DOM10-176-608 (SEQ ID NO:1660), DOM10-176-609 (SEQ ID NO:1661), DOM10-176-610 (SEQ ID NO:1662), DOM10-176-611 (SEQ ID NO:1663), DOM10-176-612 (SEQ ID NO:1664), DOM10-176-613 (SEQ ID NO:1665), DOM10-176-614 (SEQ ID NO:1666), DOM10-176-615 (SEQ ID NO:1667), DOM10-176-616 (SEQ ID NO:1668), DOM10-176-617 (SEQ ID NO:1669), DOM10-176-618 (SEQ ID NO:1670), DOM10-176-619 (SEQ ID NO:1671), DOM10-176-620 (SEQ ID NO:1672), DOM10-176-621 (SEQ ID NO:1673), DOM10-176-622 (SEQ ID NO:1674), DOM10-176-623 (SEQ ID NO:1675), DOM10-176-624 (SEQ ID NO:1676), DOM10-176-625 (SEQ ID NO:1677), DOM10-176-626 (SEQ ID NO:1678), DOM10-176-627 (SEQ ID NO:1679), DOM10-176-628 (SEQ ID NO:1680), DOM10-176-629 (SEQ ID NO:1681), DOMO-176-630 (SEQ ID NO:1682), DOM10-176-631 (SEQ ID NO:1683), DOM10-176-632 (SEQ ID NO:1684), DOM10-176-633 (SEQ ID NO:1685), DOM10-176-634 (SEQ ID NO:1686), DOM10-176-635 (SEQ ID NO:1687), DOM10-176-636 (SEQ ID NO:1688), DOM10-176-637 (SEQ ID NO:1689), DOM10-176-638 (SEQ ID NO:1690), DOMO-176-639 (SEQ ID NO:1691), DOM10-176-640 (SEQ ID NO:1692), DOM10-176-641 (SEQ ID NO:1693), DOM10-176-643 (SEQ ID NO:1694), DOM10-176-644 (SEQ ID NO:1695), DOM10-176-645 (SEQ ID NO:1696), DOM10-176-646 (SEQ ID NO:1697), DOM10-176-647 (SEQ ID NO:1698), DOM10-176-648 (SEQ ID NO:1699), DOM10-176-649 (SEQ ID NO:1700), DOM10-176-650 (SEQ ID NO:1701), DOM10-176-651 (SEQ ID NO:1702), DOM10-176-652 (SEQ ID NO:1703), DOM10-176-653 (SEQ ID NO:1704), DOM10-176-654 (SEQ ID NO:1705), DOM10-176-655 (SEQ ID NO:1706), DOM10-176-656 (SEQ ID NO:1707), DOM10-176-657 (SEQ ID NO:1708), DOM10-176-658 (SEQ ID NO:1709), DOM10-176-659 (SEQ ID NO:1710), DOM10-176-660 (SEQ ID NO:1711), DOM10-176-661 (SEQ ID NO:1712), DOM10-176-662 (SEQ ID NO:1713), DOM10-176-663 (SEQ ID NO:1714), DOM10-176-664 (SEQ ID NO:1715), DOM10-176-665 (SEQ ID NO:1716), DOMO-176-666 (SEQ ID NO:1717), DOM10-176-667 (SEQ ID NO:1718), DOM10-176-668 (SEQ ID NO:1719), DOM10-176-669 (SEQ ID NO:1720), DOM10-176-670 (SEQ ID NO:1721), DOM10-176-671 (SEQ ID NO:1722), DOM10-176-672 (SEQ ID NO:1723), DOM10-176-673 (SEQ ID NO:1724), DOM10-176-674 (SEQ ID NO:1725), DOM10-176-675 (SEQ ID NO:1726), DOM10-253 (SEQ ID NO:1727), DOM10-255 (SEQ ID NO:1728), DOM10-272 (SEQ ID NO:1729), DOM10-307 (SEQ ID NO:1730), DOM10-319 (SEQ ID NO:1731) and DOM10-319-1 (SEQ ID NO:1732).

[0252] In some embodiments, the polypeptide domain that has a binding site with binding specificity for IL-13 (e.g., a dAb) comprises an amino acid sequence that has at least about 80%, at least about 85%, at least about 90%, at least about 91%, at least about 92%, at least about 93%, at least about 94%, at least about 95%, at least about 96%, at least about 97%, at least about 98%, or at least about 99% amino acid sequence identity with the amino acid sequence or a dAb selected from the group consisting of DOM10-236 (SEQ ID NO:2129), DOM10-238 (SEQ ID NO:2130), DOM10-241 (SEQ ID NO:2131), DOM10-245 (SEQ ID NO:2132), DOM10-249 (SEQ ID NO:2133), DOM10-250 (SEQ ID NO:2134), DOM10-251 (SEQ ID NO:2135), DOM10-254 (SEQ ID NO:2136), DOM10-256 (SEQ ID NO:2137), DOM10-259 (SEQ ID NO:2138), DOM10-260 (SEQ ID NO:2139), DOM10-261 (SEQ ID NO:2140), DOM10-263 (SEQ ID NO:2141), DOM10-264 (SEQ ID NO:2142), DOM10-273 (SEQ ID NO:2143), DOM10-278 (SEQ ID NO:2144), DOM10-279 (SEQ ID NO:2145), DOM10-281 (SEQ ID NO:2146), DOM10-282 (SEQ ID NO:2147), DOM10-283 (SEQ ID NO:2148), DOM10-400 (SEQ ID NO:2149), DOM10-401 (SEQ ID NO:2150), DOM10-402 (SEQ ID NO:2151), DOM10-404 (SEQ ID NO:2152), DOM10-406 (SEQ ID NO:2153), DOM10-407 (SEQ ID NO:2154), DOM10-409 (SEQ ID NO:2155), DOM10-410 (SEQ ID NO:2156), DOM10-414 (SEQ ID NO:2157), DOM10-415 (SEQ ID NO:2158), DOM10-416 (SEQ ID NO:2159), DOM10-418 (SEQ ID NO:2160), DOM10-420 (SEQ ID NO:2161), DOM10-422 (SEQ ID NO:2162), DOM10-423 (SEQ ID NO:2163), DOM10-424 (SEQ ID NO:2164), DOM10-425 (SEQ ID NO:2165), DOM10-426 (SEQ ID NO:2166), DOM10-427 (SEQ ID NO:2167), DOM10-428 (SEQ ID NO:2168), DOM10-429 (SEQ ID NO:2169), DOM10-430 (SEQ ID NO:2170), DOM10-431 (SEQ ID NO:2171), DOM10-432 (SEQ ID NO:2172), DOM10-433 (SEQ ID NO:2173), DOM10-467 (SEQ ID NO:2174), DOM10-468 (SEQ ID NO:2175), DOM10-469 (SEQ ID NO:2176), DOM10-470 (SEQ ID NO:2177), DOM10-234 (SEQ ID NO:2178), DOM10-235 (SEQ ID NO:2179), DOM10-237 (SEQ ID NO:2180), DOM10-239 (SEQ ID NO:2181), DOM10-240 (SEQ ID NO:2182), DOM10-242 (SEQ ID NO:2183), DOM10-243 (SEQ ID NO:2184), DOM10-244 (SEQ ID NO:2185), DOM10-246 (SEQ ID NO:2186), DOM10-247 (SEQ ID NO:2187), DOM10-248 (SEQ ID NO:2188), DOM10-252 (SEQ ID NO:2189), DOM10-257 (SEQ ID NO:2190), DOM10-258 (SEQ ID NO:2191), DOM10-262 (SEQ ID NO:2192), DOM10-265 (SEQ ID NO:2193), DOM10-266 (SEQ ID NO:2194), DOM10-274 (SEQ ID NO:2195), DOM10-275 (SEQ ID NO:2196), DOM10-276 (SEQ ID NO:2197), DOM10-277 (SEQ ID NO:2198), DOM10-280 (SEQ ID NO:2199), DOM10-403 (SEQ ID NO:2200), DOM10-405 (SEQ ID NO:2201), DOM10-408 (SEQ ID NO:2202), DOM10-411 (SEQ ID NO:2203), DOM10-412 (SEQ ID NO:2204), DOM10-413 (SEQ ID NO:2205), DOM10-417 (SEQ ID NO:2206), DOM10-419 (SEQ ID NO:2207), DOM10-472 (SEQ ID NO:2208), DOM10-203 (SEQ ID NO:2209), DOM10-205 (SEQ ID NO:2210), DOM10-208 (SEQ ID NO:2211), DOM10-218 (SEQ ID NO:2212), DOM10-219 (SEQ ID NO:2213), DOM10-220 (SEQ ID NO:2214), DOM10-225 (SEQ ID NO:2215), DOM10-228 (SEQ ID NO:2216), DOM10-229 (SEQ ID NO:2217), DOM10-230 (SEQ ID NO:2218), DOM10-231 (SEQ ID NO:2219), DOM10-268 (SEQ ID NO:2220), DOM10-201 (SEQ ID NO:2221), DOM10-202 (SEQ ID NO:2222), DOM10-204 (SEQ ID NO:2223), DOM10-206 (SEQ ID NO:2224), DOM10-207 (SEQ ID NO:2225), DOM10-209 (SEQ ID NO:2226), DOM10-210 (SEQ ID NO:2227), DOM10-211 (SEQ ID NO:2228), DOM10-213 (SEQ ID NO:2229), DOM10-214 (SEQ ID NO:2230), DOM10-215 (SEQ ID NO:2231), DOM10-216 (SEQ ID NO:2232), DOM10-217 (SEQ ID NO:2233), DOM10-221 (SEQ ID NO:2234), DOM10-223 (SEQ ID NO:2235), DOM10-224 (SEQ ID NO:2236), DOM10-227 (SEQ ID NO:2237), DOM10-232 (SEQ ID NO:2238), DOM10-267 (SEQ ID NO:2239), DOM10-270 (SEQ ID NO:2240), DOM10-275-1 (SEQ ID NO:2241), DOM10-276-2 (SEQ ID NO:2242), DOM10-276-3 (SEQ ID NO:2243), DOM10-275-3 (SEQ ID NO:2244), DOM10-277-2 (SEQ ID NO:2245), DOM10-277-3 (SEQ ID NO:2246), DOM10-273-1 (SEQ ID NO:2247), DOM10-273-2 (SEQ ID NO:2248), DOM10-275-2 (SEQ ID NO:2249), DOM10-275-4 (SEQ ID NO:2250), DOM10-276-1 (SEQ ID NO:2251), DOM10-276-4 (SEQ ID NO:2252), DOM10-277-1 (SEQ ID NO:2253), DOM10-275-13 (SEQ ID NO:2254), DOM10-275-15 (SEQ ID NO:2255), DOM10-275-20 (SEQ ID NO:2256), DOM10-275-8 (SEQ ID NO:2257), DOM10-276-13 (SEQ ID NO:2258), DOM10-276-14 (SEQ ID NO:2259), DOM10-276-15 (SEQ ID NO:2260), DOM10-276-17 (SEQ ID NO:2261), DOM10-276-7 (SEQ ID NO:2262), DOM10-276-8 (SEQ ID NO:2263), DOM10-275-11 (SEQ ID NO:2264), DOM10-275-12 (SEQ ID NO:2265), DOM10-275-14 (SEQ ID NO:2266), DOM10-275-16 (SEQ ID NO:2267), DOM10-275-17 (SEQ ID NO:2268), DOM10-275-5 (SEQ ID NO:2269), DOM10-275-6 (SEQ ID NO:2270), DOM10-275-7 (SEQ ID NO:2271), DOM10-275-9 (SEQ ID NO:2272), DOM10-276-10 (SEQ ID NO:2273), DOM10-276-11 (SEQ ID NO:2274), DOM10-276-12 (SEQ ID NO:2275), DOM10-276-16 (SEQ ID NO:2276), DOM10-276-5 (SEQ ID NO:2277), DOM10-276-6 (SEQ ID NO:2278), DOM10-276-9 (SEQ ID NO:2279), DOM10-212 (SEQ ID NO:2280), DOM10-53-424 (SEQ ID NO:2281), DOM10-53-425 (SEQ ID NO:2282), DOM10-53-426 (SEQ ID NO:2283), DOM10-53-422 (SEQ ID NO:2284), DOM10-53-423 (SEQ ID NO:2285), DOM10-53-613 (SEQ ID NO:2286), DOM10-53-517 (SEQ ID NO:2287), DOM10-53-519 (SEQ ID NO:2288), DOM10-53-520 (SEQ ID NO:2289), DOM10-53-521 (SEQ ID NO:2290), DOM10-53-522 (SEQ ID NO:2291), DOM10-53-526 (SEQ ID NO:2292), DOM10-53-527 (SEQ ID NO:2293), DOM10-53-528 (SEQ ID NO:2294), DOM10-53-518 (SEQ ID NO:2295), DOM10-53-523 (SEQ ID NO:2296), DOM10-53-524 (SEQ ID NO:2297), DOM10-53-525 (SEQ ID NO:2298), DOM10-53-601 (SEQ ID NO:2299), DOM10-53-602 (SEQ ID NO:2300), DOM10-53-605 (SEQ ID NO:2301), DOM10-53-606 (SEQ ID NO:2302), DOM10-53-607 (SEQ ID NO:2303), DOM10-53-608 (SEQ ID NO:2304), DOM10-53-609 (SEQ ID NO:2305), DOM10-53-610 (SEQ ID NO:2306), DOM10-53-611 (SEQ ID NO:2307), DOM10-53-612 (SEQ ID NO:2308), DOM10-53-603 (SEQ ID NO:2309), DOM10-53-604 (SEQ ID NO:2310), DOM10-53-429 (SEQ ID NO:2311), DOM10-53-432 (SEQ ID NO:2312), DOM10-53-433 (SEQ ID NO:2313), DOM10-53-435 (SEQ ID NO:2314), DOM10-53-430 (SEQ ID NO:2315), DOM10-53-431 (SEQ ID NO:2316), DOM10-53-434 (SEQ ID NO:2317), DOM10-53-436 (SEQ ID NO:2318), DOM10-53-437 (SEQ ID NO:2319), DOM10-53-438 (SEQ ID NO:2320), DOM10-53-440 (SEQ ID NO:2321), DOM10-53-439 (SEQ ID NO:2322), DOM10-53-441 (SEQ ID NO:2323), DOM10-53-442 (SEQ ID NO:2324), DOM10-53-443 (SEQ ID NO:2325), DOM10-53-444 (SEQ ID NO:2326), DOM10-53-445 (SEQ ID NO:2327), DOM10-53-446 (SEQ ID NO:2328), DOM10-53-447 (SEQ ID NO:2329), DOM10-53-449 (SEQ ID NO:2330), DOM10-53-448 (SEQ ID NO:2331), DOM10-53-450 (SEQ ID NO:2332), DOM10-53-451 (SEQ ID NO:2333), DOM10-53-452 (SEQ ID NO:2334), DOM10-53-453 (SEQ ID NO:2335), DOM10-53-454 (SEQ ID NO:2336), DOM10-53-455 (SEQ ID NO:2337), DOM10-53-456 (SEQ ID NO:2338), DOM10-53-457 (SEQ ID NO:2339), DOM10-53-458 (SEQ ID NO:2340), DOM10-53-459 (SEQ ID NO:2341), DOM10-53-461 (SEQ ID NO:2342), DOM10-53-462 (SEQ ID NO:2343), DOM10-53-465 (SEQ ID NO:2344), DOM10-53-466 (SEQ ID NO:2345), DOM10-53-467 (SEQ ID NO:2346), DOM10-53-468 (SEQ ID NO:2347), DOM10-53-460 (SEQ ID NO:2348), DOM10-53-463 (SEQ ID NO:2349), DOM10-53-464 (SEQ ID NO:2350), DOM10-53-469 (SEQ ID NO:2351), DOM10-53-471 (SEQ ID NO:2352), DOM10-53-470 (SEQ ID NO:2353), DOM10-53-533 (SEQ ID NO:2354), DOM10-53-534 (SEQ ID NO:2355), DOM10-53-535 (SEQ ID NO:2356), DOM10-53-537 (SEQ ID NO:2357), DOM10-53-538 (SEQ ID NO:2358), DOM10-53-539 (SEQ ID NO:2359), DOM10-53-540 (SEQ ID NO:2360), DOM10-53-531 (SEQ ID NO:2361), DOM10-53-532 (SEQ ID NO:2362), DOM10-53-536 (SEQ ID NO:2363), DOM10-53-542 (SEQ ID NO:2364), DOM10-53-541 (SEQ ID NO:2365), DOM10-53-473 (SEQ ID NO:2366), DOM10-53-472 (SEQ ID NO:2367), DOM10-53-475 (SEQ ID NO:2368), DOM10-53-474 (SEQ ID NO:2369), DOM10-53-543 (SEQ ID NO:2370), DOM10-53-544 (SEQ ID NO: 2371), DOM10-53-545 (SEQ ID NO:2372), DOM10-53-548 (SEQ ID NO:2373), DOM10-53-546 (SEQ ID NO:2374), DOM10-53-549 (SEQ ID NO:2375), DOM10-53-547 (SEQ ID NO:2376), DOM10-53-550 (SEQ ID NO:2377), DOM10-53-551 (SEQ ID NO:2378), DOM10-53-560 (SEQ ID NO:2379), DOM10-53-565 (SEQ ID NO:2380), DOM10-53-559 (SEQ ID NO:2381), DOM10-53-561 (SEQ ID NO:2382), DOM10-53-562 (SEQ ID NO:2383), DOM10-53-563 (SEQ ID NO:2384), DOM10-53-564 (SEQ ID NO:2385), DOM10-53-566 (SEQ ID NO:2386), DOM10-53-554 (SEQ ID NO:2387), DOM10-53-552 (SEQ ID NO:2388), DOM10-53-553 (SEQ ID NO:2389), DOM10-53-558 (SEQ ID NO:2390), DOM10-53-556 (SEQ ID NO:2391) and DOM10-53-557 (SEQ ID NO:2392).

[0253] In some embodiments, the polypeptide domain that has a binding site with binding specificity for IL-13 (e.g., a dAb) comprises an amino acid sequence that has at least about 70%, at least about 75%, at least about 80%, at least about 85%, at least about 90%, at least about 91%, at least about 92%, at least about 93%, at least about 94%, at least about 95%, at least about 96%, at least about 97%, at least about 98%, or at least about 99% amino acid sequence identity with the amino acid sequence or a dAb selected from the group consisting of DOM10-53-474 (SEQ ID NO:2369), DOM10-275-78 (SEQ ID NO:2456), DOM10-275-94 (SEQ ID NO:2457), DOM10-275-99 (SEQ ID NO:2458), DOM10-275-100 (SEQ ID NO:2459) and DOM10-275-101 (SEQ ID NO:2460).

[0254] In some embodiments, the polypeptide domain that has a binding site with binding specificity for IL-13 (e.g., a dAb) comprises an amino acid sequence that has at least about 70%, at least about 75%, at least about 80%, at least about 85%, at least about 90%, at least about 91%, at least about 92%, at least about 93%, at least about 94%, at least about 95%, at least about 96%, at least about 97%, at least about 98%, or at least about 99% amino acid sequence identity with the amino acid sequence or a dAb selected from the group consisting of DOM10-275-78 (SEQ ID NO:2456), DOM10-275-94 (SEQ ID NO:2457), DOM10-275-99 (SEQ ID NO:2458), DOM10-275-100 (SEQ ID NO:2459) and DOM10-275-101 (SEQ ID NO:2460).

[0255] In preferred embodiments, the polypeptide domain that has a binding site with binding specificity for IL-13 (e.g., a dAb) comprises an amino acid sequence that has at least about 90%, at least about 91%, at least about 92%, at least about 93%, at least about 94%, at least about 95%, at least about 96%, at least about 97%, at least about 98%, or at least about 99% amino acid sequence identity with the amino acid sequence of DOM-10-53 (SEQ ID NO:967) or DOM10-176-535 (SEQ ID NO:1587). For example, the polypeptide domain that has a binding site with binding specificity for IL-13 can comprise the amino acid sequence of DOM10-176-535 (SEQ ID NO:1587), DOM10-53-223 (SEQ ID NO:1090), DOM10-53-234 (SEQ ID NO:1101), DOM10-53-316 (SEQ ID NO:1182), DOM10-53-339 (SEQ ID NO:1203), DOM10-53-344 (SEQ ID NO:1208), DOM10-53-396 (SEQ ID NO:1260), DOM10-53-474 (SEQ ID NO:2369) and DOM10-275-1 (SEQ ID NO:2241).

[0256] In some embodiments, the polypeptide domain that has a binding site with binding specificity for IL-13 competes with any of the dAbs disclosed herein for binding to IL-13.

[0257] Preferably the polypeptide domain that has a binding site with binding specificity for IL-13 is an immunoglobulin single variable domain. The polypeptide domain that has a binding site with binding specificity for IL-13 can comprise any suitable immunoglobulin variable domain, and preferably comprises a human variable domain or a variable domain that comprises human framework regions. In certain embodiments, the polypeptide domain that has a binding site with binding specificity for IL-13 comprises a universal framework, as described herein.

[0258] The ligand of the invention (e.g., ligand that has binding specificity for IL-4 and IL-13, ligand that has binding specificity for IL-13) can comprise a non-immunoglobulin binding moiety that has binding specificity for IL-13 and inhibits a function of IL-13 (e.g., binding to receptor), wherein the non-immunoglobulin binding moiety comprises one, two or three of the CDRs of a V_{H}, V_{L} or V_{HH} that binds IL-13 and a suitable scaffold. In certain embodiments, the non-immunoglobulin binding moiety comprises CDR3 but not CDR1 or CDR2 of a V_{H}, V_{L} or V_{HH} that binds IL-13 and a suitable scaffold. In other embodiments, the non-immunoglobulin binding moiety comprises CDR1 and CDR2, but not CDR3 of a V_{H}, V_{L} or V_{HH} that binds IL-13 and a suitable scaffold. In other embodiments, the non-immunoglobulin binding moiety comprises CDR1, CDR2 and CDR3 of a V_{H}, V_{L} or V_{HH} that binds IL-13 and a suitable scaffold. Preferably, the CDR or CDRs of the ligand of these embodiments is a CDR or CDRs of an anti-IL-13 dAb described herein. Preferably, the non-immunoglobulin binding moiety comprises one, two, or three of the CDRs of one of the anti-IL-13 dAbs disclosed herein. In other embodiments, the ligand (e.g., ligand that has binding specificity for IL-4 and IL-13, ligand that has binding specificity for IL-13) comprises only CDR3 of a V_{H}, V_{L} or V_{HH} that binds IL-13. The non-immunoglobulin domain can comprise an amino acid sequence that has one or more regions that have sequence identity to one, two or three of the CDRs of an anti-IL-13 dAb described herein. For example, the non-immunoglobulin domain can have an amino acid sequence that contains at least about 50%, at least about 60%, at least about 70%, at least about 80%, or at least about 90% sequence identity with CDR1, CDR2 and/or CDR3 of an anti-IL13 dAb disclosed herein. Even more preferably, the non-immunoglobulin binding moiety comprises one, two, or three of the CDRs of DOM10-176-535 (SEQ ID NO:1587), DOM10-53-223 (SEQ ID NO:1090), DOM10-53-234 (SEQ ID NO:1101), DOM10-53-316 (SEQ ID NO:1182), DOM10-53-339 (SEQ ID NO:1203), DOM10-53-344 (SEQ ID NO:1208) and DOM10-53-396 (SEQ ID NO:1260).

[0259] In certain preferred embodiments, the non-immunoglobulin binding moiety comprises one, two, or three of the CDRs of DOM10-53-474 (SEQ ID NO:2369), DOM10-275-78 (SEQ ID NO:2456), DOM10-275-94 (SEQ ID NO:2457), DOM10-275-99 (SEQ ID NO:2458), DOM10-275-100 (SEQ ID NO:2459) or DOM10-275-101 (SEQ ID NO:2460).

[0260] In certain embodiments, a polypeptide domain that has a binding site with binding specificity for IL-13 resists aggregation, unfolds reversibly, comprises a framework region and/or is secreted as described above for the polypeptide domain that has a binding site with binding specificity for IL-4

dAb Monomers that Bind Serum Albumin

[0261] The ligands of the invention can further comprise a dAb monomer that binds serum albumin (SA) with a K_{d} of 1 nM to 500 μM (i.e., ×10⁻⁹ to 5×10⁻⁴), preferably 100 nM to 10 μM. Preferably, for a ligand comprising an anti-SA dAb, the binding (e.g. K_{d} and/or K_{off} as measured by surface plasmon resonance, (e.g., using BiaCore)) of the ligand its target(s) is from 1 to 100000 times (preferably 100 to 100000, more preferably 1000 to 100000, or 10000 to 100000 times) stronger than for SA. Preferably, the serum albumin is human serum albumin (HSA). In one embodiment, the first dAb (or a dAb monomer) binds SA (e.g., HSA) with a K_{d} of approximately 50, preferably 70, and more preferably 100, 150 or 200 nM.

[0262] In certain embodiments, the dAb monomer that binds SA resists aggregation, unfolds reversibly and/or comprises a framework region as described above for dAb monomers that bind IL-4.

[0263] In particular embodiments, the antigen-binding fragment of an antibody that binds serum albumin is a dAb that binds human serum albumin. In certain embodiments, the dAb binds human serum albumin and competes for binding to albumin with a dAb selected from the group consisting of DOM7m-16 (SEQ ID NO:2462), DOM7m-12 (SEQ ID NO:2463), DOM7m-26 (SEQ ID NO:2464), DOM7r-1 (SEQ ID NO:1736), DOM7r-3 (SEQ ID NO:1737), DOM7r-4 (SEQ ID NO:1738), DOM7r-5 (SEQ ID NO:1739), DOM7r-7 (SEQ ID NO:1740), DOM7r-8 (SEQ ID NO:1741), DOM7h-2 (SEQ ID NO:1742), DOM7h-3 (SEQ ID NO:1743), DOM7h-4 (SEQ ID NO:1744), DOM7h-6 (SEQ ID NO:1745), DOM7h-1 (SEQ ID NO:1746), DOM7h-7 (SEQ ID NO:1747), DOM7h-22 (SEQ ID NO:1748), DOM7h-23 (SEQ ID NO:1749), DOM7h-24 (SEQ ID NO:1750), DOM7h-25 (SEQ ID NO:1751), DOM7h-26 (SEQ ID NO:1752), DOM7h-21 (SEQ ID NO:1753), DOM7h-27 (SEQ ID NO:1754), DOM7h-8 (SEQ ID NO:1756), DOM7r-13 (SEQ ID NO:1757), DOM7r-14 (SEQ ID NO:1758), DOM7r-15 (SEQ ID NO:1759), DOM7r-16 (SEQ ID NO:1760), DOM7r-17 (SEQ ID NO:1761), DOM7r-18 (SEQ ID NO:1762), DOM7r-19 (SEQ ID NO:1763), DOM7r-20 (SEQ ID NO:1764), DOM7r-21 (SEQ ID NO:1765), DOM7r-22 (SEQ ID NO:1766), DOM7r-23 (SEQ ID NO:1767), DOM7r-24 (SEQ ID NO:1768), DOM7r-25 (SEQ ID NO:1769), DOM7r-26 (SEQ ID NO:1770), DOM7r-27 (SEQ ID NO:1771), DOM7r-28 (SEQ ID NO:1772), DOM7r-29 (SEQ ID NO:1773), DOM7r-30 (SEQ ID NO:1774), DOM7r-31 (SEQ ID NO:1775), DOM7r-32 (SEQ ID NO:1776), and DOM7r-33 (SEQ ID NO:1777).

[0264] In certain embodiments, the dAb binds human serum albumin and comprises an amino acid sequence that has at least about 80%, or at least about 85%, or at least about 90%, or at least about 95%, or at least about 96%, or at least about 97%, or at least about 98%, or at least about 99% amino acid sequence identity with the amino acid sequence of a dAb selected from the group consisting of DOM7m-16 (SEQ ID NO:2462), DOM7m-12 (SEQ ID NO:2463), DOM7m-26 (SEQ ID NO:2464), DOM7r-1 (SEQ ID NO:1736), DOM7r-3 (SEQ ID NO:1737), DOM7r-4 (SEQ ID NO:1738), DOM7r-5 (SEQ ID NO:1739), DOM7r-7 (SEQ ID NO:1740), DOM7r-8 (SEQ ID NO:1741), DOM7h-2 (SEQ ID NO:1742), DOM7h-3 (SEQ ID NO:1743), DOM7h-4 (SEQ ID NO:1744), DOM7h-6 (SEQ ID NO:1745), DOM7h-1 (SEQ ID NO:1746), DOM7h-7 (SEQ ID NO:1747), DOM7h-22 (SEQ ID NO:1748), DOM7h-23 (SEQ ID NO:1749), DOM7h-24 (SEQ ID NO:1750), DOM7h-25 (SEQ ID NO:1751), DOM7h-26 (SEQ ID NO:1752), DOM7h-21 (SEQ ID NO:1753), DOM7h-27 (SEQ ID NO:1754), DOM7h-8 (SEQ ID NO:1756), DOM7r-13 (SEQ ID NO:1757), DOM7r-14 (SEQ ID NO:1758), DOM7r-15 (SEQ ID NO:1759), DOM7r-16 (SEQ ID NO:1760), DOM7r-17 (SEQ ID NO:1761), DOM7r-18 (SEQ ID NO:1762), DOM7r-19 (SEQ ID NO:1763), DOM7r-20 (SEQ ID NO:1764), DOM7r-21 (SEQ ID NO:1765), DOM7r-22 (SEQ ID NO:1766), DOM7r-23 (SEQ ID NO:1767), DOM7r-24 (SEQ ID NO:1768), DOM7r-25 (SEQ ID NO:1769), DOM7r-26 (SEQ ID NO:1770), DOM7r-27 (SEQ ID NO:1771), DOM7r-28 (SEQ ID NO:1772), DOM7r-29 (SEQ ID NO:1773), DOM7r-30 (SEQ ID NO:1774), DOM7r-31 (SEQ ID NO:1775), DOM7r-32 (SEQ ID NO:1776), and DOM7r-33 (SEQ ID NO:1777).

[0265] For example, the dAb that binds human serum albumin can comprise an amino acid sequence that has at least about 90%, or at least about 95%, or at least about 96%, or at least about 97%, or at least about 98%, or at least about 99% amino acid sequence identity with DOM7h-2 (SEQ ID NO:1742), DOM7h-3 (SEQ ID NO:1743), DOM7h-4 (SEQ ID NO:1744), DOM7h-6 (SEQ ID NO:1745), DOM7h-1 (SEQ ID NO:1746), DOM7h-7 (SEQ ID NO:1747), DOM7h-8 (SEQ ID NO:1756), DOM7r-13 (SEQ ID NO:1757), DOM7r-14 (SEQ ID NO:1758), DOM7h-22 (SEQ ID NO:1748), DOM7h-23 (SEQ ID NO:1749), DOM7h-24 (SEQ ID NO:1750), DOM7h-25 (SEQ ID NO:1751), DOM7h-26 (SEQ ID NO:1752), DOM7h-21 (SEQ ID NO:1753), and DOM7h-27 (SEQ ID NO:1754).

[0266] Amino acid sequence identity is preferably determined using a suitable sequence alignment algorithm and default parameters, such as BLAST P (Karlin and Altschul, Proc. Natl. Acad. Sci. USA, 87(6):2264-2268 (1990)).

[0267] In more particular embodiments, the dAb is a V_{κ} dAb that binds human serum albumin and has an amino acid sequence selected from the group consisting of DOM7h-2 (SEQ ID NO:1742), DOM7h-3 (SEQ ID NO:1743), DOM7h-4 (SEQ ID NO:1744), DOM7h-6 (SEQ ID NO:1745), DOM7h-1 (SEQ ID NO:1746), DOM7h-7 (SEQ ID NO:1747), DOM7h-8 (SEQ ID NO:1756), DOM7r-13 (SEQ ID NO:1757), and DOM7r-14 (SEQ ID NO:1758), or a V_{H} dAb that has an amino acid sequence selected from the group consisting of: DOM7h-22 (SEQ ID NO:1748), DOM7h-23 (SEQ ID NO:1749), DOM7h-24 (SEQ ID NO:1750), DOM7h-25 (SEQ ID NO:1751), DOM7h-26 (SEQ ID NO:1752), DOM7h-21 (SEQ ID NO:1753), DOM7h-27 (SEQ ID NO:1754). In other embodiments, the antigen-binding fragment of an antibody that binds serum albumin is a dAb that binds human serum albumin and comprises the CDRs of any of the foregoing amino acid sequences.

[0268] Suitable Camelid V_{HH} that bind serum albumin include those disclosed in WO 2004/041862 (Ablynx N.V.) and herein, such as Sequence A (SEQ ID NO:1778), Sequence B (SEQ ID NO:1779), Sequence C (SEQ ID NO:1780), Sequence D (SEQ ID NO:1781), Sequence E (SEQ ID NO:1782), Sequence F (SEQ ID NO:1783), Sequence G (SEQ ID NO:1784), Sequence H (SEQ ID NO:1785), Sequence I (SEQ ID NO:1786), Sequence J (SEQ ID NO:1787), Sequence K (SEQ ID NO:1788), Sequence L (SEQ ID NO:1789), Sequence M (SEQ ID NO:1790), Sequence N (SEQ ID NO:1791), Sequence 0 (SEQ ID NO:1792), Sequence P (SEQ ID NO:1793), Sequence Q (SEQ ID NO:1794). In certain embodiments, the Camelid V_{HH} binds human serum albumin and comprises an amino acid sequence that has at least about 80%, or at least about 85%, or at least about 90%, or at least about 95%, or at least about 96%, or at least about 97%, or at least about 98%, or at least about 99% amino acid sequence identity with any one of SEQ ID NOS:1778-1794.

[0269] Amino acid sequence identity is preferably determined using a suitable sequence alignment algorithm and default parameters, such as BLAST P (Karlin and Altschul, Proc. Natl. Acad. Sci. USA, 87(6):2264-2268 (1990)).

[0270] In some embodiments, the ligand comprises an anti-serum albumin dAb that competes with any anti-serum albumin dAb disclosed herein for binding to serum albumin (e.g., human serum albumin).

### Nucleic Acid Molecules, Vectors and Host Cells

[0271] The invention also provides isolated and/or recombinant nucleic acid molecules encoding ligands, (dual-specific ligands and multispecific ligands) as described herein.

[0272] Nucleic acids referred to herein as “isolated” are nucleic acids which have been separated away from the nucleic acids of the genomic DNA or cellular RNA of their source of origin (e.g., as it exists in cells or in a mixture of nucleic acids such as a library), and include nucleic acids obtained by methods described herein or other suitable methods, including essentially pure nucleic acids, nucleic acids produced by chemical synthesis, by combinations of biological and chemical methods, and recombinant nucleic acids which are isolated (see e.g., Daugherty, B. L. et al., Nucleic Acids Res., 19(9): 2471-2476 (1991); Lewis, A. P. and J. S. Crowe, Gene, 101: 297-302 (1991)).

[0273] Nucleic acids referred to herein as “recombinant” are nucleic acids which have been produced by recombinant DNA methodology, including those nucleic acids that are generated by procedures which rely upon a method of artificial recombination, such as the polymerase chain reaction (PCR) and/or cloning into a vector using restriction enzymes.

[0274] In certain embodiments, the isolated and/or recombinant nucleic acid comprises a nucleotide sequence encoding a ligand, as described herein, wherein said ligand comprises an amino acid sequence that has at least about 80%, at least about 85%, at least about 90%, at least about 91%, at least about 92%, at least about 93%, at least about 94%, at least about 95%, at least about 96%, at least about 97%, at least about 98%, or at least about 99% amino acid sequence identity with the amino acid sequence of a dAb that binds IL-4 disclosed herein, or a dAb that binds IL-13 disclosed herein.

[0275] For example, in some embodiments, the isolated and/or recombinant nucleic acid comprises a nucleotide sequence encoding a ligand that has binding specificity for IL-4, as described herein, wherein said ligand comprises an amino acid sequence that has at least about 80%, at least about 85%, at least about 90%, at least about 91%, at least about 92%, at least about 93%, at least about 94%, at least about 95%, at least about 96%, at least about 97%, at least about 98%, or at least about 99% amino acid sequence identity with the amino acid sequence of a dAb selected from the group consisting of DOM9-15 (SEQ ID NO:175), DOM9-17 (SEQ ID NO:176), DOM9-23 (SEQ ID NO:177), DOM9-24 (SEQ ID NO:178), DOM9-25 (SEQ ID NO:179), DOM9-27 (SEQ ID NO:180), DOM9-28 (SEQ ID NO:181), DOM9-29 (SEQ ID NO:182), DOM9-30 (SEQ ID NO:183), DOM9-31 (SEQ ID NO:184), DOM9-32 (SEQ ID NO:185), DOM9-33 (SEQ ID NO:186), DOM9-50 (SEQ ID NO:187), DOM9-57 (SEQ ID NO:188), DOM9-59 (SEQ ID NO:189), DOM9-63 (SEQ ID NO:190), DOM9-67 (SEQ ID NO:191), DOM9-68 (SEQ ID NO:192), DOM9-70 (SEQ ID NO:193), DOM9-79 (SEQ ID NO:194), DOM9-82 (SEQ ID NO:195), DOM9-86 (SEQ ID NO:196), DOM9-94 (SEQ ID NO:197), DOM9-108 (SEQ ID NO:198), DOM9-112 (SEQ ID NO:199), DOM9-112-1 (SEQ ID NO:200), DOM9-112-2 (SEQ ID NO:201), DOM9-112-3 (SEQ ID NO:202), DOM9-112-4 (SEQ ID NO:203), DOM9-112-5 (SEQ ID NO:204), DOM9-112-6 (SEQ ID NO:205), DOM9-112-7 (SEQ ID NO:206), DOM9-112-8 (SEQ ID NO:207), DOM9-112-9 (SEQ ID NO:208), DOM9-112-10 (SEQ ID NO:209), DOM9-112-11 (SEQ ID NO:210), DOM9-112-12 (SEQ ID NO:211), DOM9-112-13 (SEQ ID NO:212), DOM9-112-14 (SEQ ID NO:213), DOM9-112-15 (SEQ ID NO:214), DOM9-112-16-(SEQ ID NO:215), DOM9-112-17 (SEQ ID NO:216), DOM9-112-18 (SEQ ID NO:217), DOM9-112-19 (SEQ ID NO:218), DOM9-112-20 (SEQ ID NO:219), DOM9-112-21 (SEQ ID NO:220), DOM9-112-22 (SEQ ID NO:221), DOM9-112-23 (SEQ ID NO:222), DOM9-112-25 (SEQ ID NO:223), DOM9-112-81 (SEQ ID NO:224), DOM9-112-82 (SEQ ID NO:225), DOM9-112-83 (SEQ ID NO:226), DOM9-112-84 (SEQ ID NO:227), DOM9-112-85 (SEQ ID NO:228), DOM9-112-86 (SEQ ID NO:229), DOM9-112-87 (SEQ ID NO:230), DOM9-112-88 (SEQ ID NO:231), DOM9-112-89 (SEQ ID NO:232), DOM9-112-90 (SEQ ID NO:233), DOM9-112-91 (SEQ ID NO:234), DOM9-112-92 (SEQ ID NO:235), DOM9-112-93 (SEQ ID NO:236), DOM9-112-94 (SEQ ID NO:237), DOM9-112-95 (SEQ ID NO:238), DOM9-112-96 (SEQ ID NO:239), DOM9-112-97 (SEQ ID NO:240), DOM9-112-98 (SEQ ID NO:241), DOM9-112-99 (SEQ ID NO:242), DOM9-112-100 (SEQ ID NO:243), DOM9-112-101 (SEQ ID NO:244), DOM9-1132-102 (SEQ ID NO:245), DOM9-112-103 (SEQ ID NO:246), DOM9-112-104 (SEQ ID NO:247), DOM9-112-105 (SEQ ID NO:248), DOM9-112-106 (SEQ ID NO:249), DOM9-112-107 (SEQ ID NO:250), DOM9-112-108 (SEQ ID NO:251), DOM9-112-109 (SEQ ID NO:252), DOM9-112-110 (SEQ ID NO:253), DOM9-112-111 (SEQ ID NO:254), DOM9-112-112 (SEQ ID NO:255), DOM9-112-113 (SEQ ID NO:256), DOM9-112-114 (SEQ ID NO:257), DOM9-112-115 (SEQ ID NO:258), DOM9-112-116 (SEQ ID NO:259), DOM9-112-117 (SEQ ID NO:260), DOM9-112-118 (SEQ ID NO:261), DOM9-112-119 (SEQ ID NO:262), DOM9-112-120 (SEQ ID NO:263), DOM9-112-121 (SEQ ID NO:264), DOM9-112-122 (SEQ ID NO:265), DOM9-112-123 (SEQ ID NO:266), DOM9-112-124 (SEQ ID NO:267), DOM9-112-125 (SEQ ID NO:268), DOM9-112-126 (SEQ ID NO:269), DOM9-112-127 (SEQ ID NO:270), DOM9-112-128 (SEQ ID NO:271), DOM9-112-134 (SEQ ID NO:272), DOM9-112-135 (SEQ ID NO:273), DOM9-112-136 (SEQ ID NO:274), DOM9-112-137 (SEQ ID NO:275), DOM9-112-138 (SEQ ID NO:276), DOM9-112-140 (SEQ ID NO:277), DOM9-112-141 (SEQ ID NO:278), DOM9-112-142 (SEQ ID NO:279), DOM9-112-143 (SEQ ID NO:280), DOM9-112-144 (SEQ ID NO:281), DOM9-112-145 (SEQ ID NO:282), DOM9-112-146 (SEQ ID NO:283), DOM9-112-147 (SEQ ID NO:284), DOM9-112-148 (SEQ ID NO:285), DOM9-112-149 (SEQ ID NO:286), DOM9-112-150 (SEQ ID NO:287), DOM9-112-151 (SEQ ID NO:288), DOM9-112-152 (SEQ ID NO:289), DOM9-112-153 (SEQ ID NO:290), DOM9-112-154 (SEQ ID NO:291), DOM9-112-155 (SEQ ID NO:292), DOM9-112-156 (SEQ ID NO:293), DOM9-112-157 (SEQ ID NO:294), DOM9-112-158 (SEQ ID NO:295), DOM9-112-159 (SEQ ID NO:296), DOM9-112-160 (SEQ ID NO:297), DOM9-112-161 (SEQ ID NO:298), DOM9-112-162 (SEQ ID NO:299), DOM9-112-163 (SEQ ID NO:300), DOM9-112-164 (SEQ ID NO:301), DOM9-112-165 (SEQ ID NO:302), DOM9-112-166 (SEQ ID NO:303), DOM9-112-167 (SEQ ID NO:304), DOM9-112-168 (SEQ ID NO:305), DOM9-112-169 (SEQ ID NO:306), DOM9-112-170 (SEQ ID NO:307), DOM9-112-171 (SEQ ID NO:308), DOM9-112-172 (SEQ ID NO:309), DOM9-112-173 (SEQ ID NO:310), DOM9-112-174 (SEQ ID NO:311), DOM9-112-175 (SEQ ID NO:312), DOM9-112-176 (SEQ ID NO:313), DOM9-112-177 (SEQ ID NO:314), DOM9-112-178 (SEQ ID NO:315), DOM9-112-179 (SEQ ID NO:316), DOM9-112-180 (SEQ ID NO:317), DOM9-112-181 (SEQ ID NO:318), DOM9-112-182 (SEQ ID NO:319), DOM9-112-183 (SEQ ID NO:320), DOM9-112-184 (SEQ ID NO:321), DOM9-112-185 (SEQ ID NO:322), DOM9-112-186 (SEQ ID NO:323), DOM9-112-187 (SEQ ID NO:324), DOM9-112-188 (SEQ ID NO:325), DOM9-112-189 (SEQ ID NO:326), DOM9-112-190 (SEQ ID NO:327), DOM9-112-191 (SEQ ID NO:328), DOM9-112-192 (SEQ ID NO:329), DOM9-112-193 (SEQ ID NO:330), DOM9-112-194 (SEQ ID NO:331), DOM9-112-195 (SEQ ID NO:332), DOM9-112-196 (SEQ ID NO:333), DOM9-112-197 (SEQ ID NO:334), DOM9-112-198 (SEQ ID NO:335), DOM9-112-199 (SEQ ID NO:336), DOM9-112-200 (SEQ ID NO:337), DOM9-112-201 (SEQ ID NO:338), DOM9-112-202 (SEQ ID NO:339), DOM9-120 (SEQ ID NO:340), DOM9-121 (SEQ ID NO:341), DOM9-122 (SEQ ID NO:342), DOM9-123 (SEQ ID NO:343), DOM9-124 (SEQ ID NO:344), DOM9-125 (SEQ ID NO:345), DOM9-128 (SEQ ID NO:346), DOM9-134 (SEQ ID NO:347), DOM9-136 (SEQ ID NO:348), DOM9-26 (SEQ ID NO:500), DOM9-35 (SEQ ID NO:501), DOM9-36 (SEQ ID NO:502), DOM9-37 (SEQ ID NO:503), DOM9-38 (SEQ ID NO:504), DOM9-39 (SEQ ID NO:505), DOM9-40 (SEQ ID NO:506), DOM9-41 (SEQ ID NO:507), DOM9-43 (SEQ ID NO:508), DOM9-44 (SEQ ID NO:509), DOM9-44-500 (SEQ ID NO:510), DOM9-44-501 (SEQ ID NO:511), DOM9-44-502 (SEQ ID NO:512), DOM9-44-503 (SEQ ID NO:513), DOM9-44-504 (SEQ ID NO:514), DOM9-44-505 (SEQ ID NO:515), DOM9-44-506 (SEQ ID NO:516), DOM9-44-507 (SEQ ID NO:517), DOM9-44-509 (SEQ ID NO:518), DOM9-44-510 (SEQ ID NO:519), DOM9-44-511 (SEQ ID NO:520), DOM9-44-512 (SEQ ID NO:521), DOM9-44-513 (SEQ ID NO:522), DOM9-44-514 (SEQ ID NO:523), DOM9-44-515 (SEQ ID NO:524), DOM9-44-516 (SEQ ID NO:525), DOM9-44-517 (SEQ ID NO:526), DOM9-44-518 (SEQ ID NO:527), DOM9-44-519 (SEQ ID NO:528), DOM9-44-520 (SEQ ID NO:529), DOM9-44-521 (SEQ ID NO:530), DOM9-44-522 (SEQ ID NO:531), DOM9-44-523 (SEQ ID NO:532), DOM9-44-524 (SEQ ID NO:533), DOM9-44-525 (SEQ ID NO:534), DOM9-44-526 (SEQ ID NO:535), DOM9-44-527 (SEQ ID NO:536), DOM9-44-528 (SEQ ID NO:537), DOM9-44-529 (SEQ ID NO:538), DOM9-44-530 (SEQ ID NO:539), DOM9-44-531 (SEQ ID NO:540), DOM9-44-532 (SEQ ID NO:541), DOM9-44-533 (SEQ ID NO:542), DOM9-44-534 (SEQ ID NO:543), DOM9-44-535 (SEQ ID NO:544), DOM9-44-536 (SEQ ID NO:545), DOM9-44-537 (SEQ ID NO:546), DOM9-44-538 (SEQ ID NO:547), DOM9-44-539 (SEQ ID NO:548), DOM9-44-540 (SEQ ID NO:549), DOM9-44-541 (SEQ ID NO:550), DOM9-44-542 (SEQ ID NO:551), DOM9-44-543 (SEQ ID NO:552), DOM9-44-544 (SEQ ID NO:553), DOM9-44-545 (SEQ ID NO:554), DOM9-44-546 (SEQ ID NO:555), DOM9-44-547 (SEQ ID NO:556), DOM9-44-548 (SEQ ID NO:557), DOM9-44-549 (SEQ ID NO:558), DOM9-44-550 (SEQ ID NO:559), DOM9-44-551 (SEQ ID NO:560), DOM9-44-552 (SEQ ID NO:561), DOM9-44-553 (SEQ ID NO:562), DOM9-44-554 (SEQ ID NO:563), DOM9-44-555 (SEQ ID NO:564), DOM9-44-556 (SEQ ID NO:565), DOM9-44-557 (SEQ ID NO:566), DOM9-44-558 (SEQ ID NO:567), DOM9-44-559 (SEQ ID NO:568), DOM9-44-560 (SEQ ID NO:569), DOM9-44-561 (SEQ ID NO:570), DOM9-44-562 (SEQ ID NO:571), DOM9-44-563 (SEQ ID NO:572), DOM9-44-564 (SEQ ID NO:573), DOM9-44-565 (SEQ ID NO:574), DOM9-44-566 (SEQ ID NO:575), DOM9-44-625 (SEQ ID NO:576), DOM9-44-626 (SEQ ID NO:577), DOM9-44-627 (SEQ ID NO:578), DOM9-44-628 (SEQ ID NO:579), DOM9-44-629 (SEQ ID NO:580), DOM9-44-630 (SEQ ID NO:581), DOM9-44-631 (SEQ ID NO:582), DOM9-44-632 (SEQ ID NO:583), DOM9-44-633 (SEQ ID NO:584), DOM9-44-634 (SEQ ID NO:585), DOM9-44-636 (SEQ ID NO:586), DOM9-44-637 (SEQ ID NO:587), DOM9-44-639 (SEQ ID NO:588), DOM9-44-640 (SEQ ID NO:589), DOM9-44-641 (SEQ ID NO:590), DOM9-44-642 (SEQ ID NO:591), DOM9-44-643 (SEQ ID NO:592), DOM9-44-644 (SEQ ID NO:593), DOM9-45 (SEQ ID NO:594), DOM9-46 (SEQ ID NO:595), DOM9-47 (SEQ ID NO:596), DOM9-48 (SEQ ID NO:597), DOM9-143 (SEQ ID NO:598), DOM9-144 (SEQ ID NO:599), DOM9-146 (SEQ ID NO:600), DOM9-152 (SEQ ID NO:601), DOM9-155 (SEQ ID NO:602), DOM9-155-001 (SEQ ID NO:603), DOM9-155-3 (SEQ ID NO:604), DOM9-155-5 (SEQ ID NO:605), DOM9-155-8 (SEQ ID NO:606), DOM9-155-9 (SEQ ID NO:607), DOM9-155-11 (SEQ ID NO:608), DOM9-155-13 (SEQ ID NO:609), DOM9-155-14 (SEQ ID NO:610), DOM9-155-17 (SEQ ID NO:611), DOM9-155-19 (SEQ ID NO:612), DOM9-155-20 (SEQ ID NO:613), DOM9-155-22 (SEQ ID NO:614), DOM9-155-23 (SEQ ID NO:615), DOM9-155-24 (SEQ ID NO:616), DOM9-155-25 (SEQ ID NO:617), DOM9-155-26 (SEQ ID NO:618), DOM9-155-27 (SEQ ID NO:619), DOM9-155-28 (SEQ ID NO:620), DOM9-155-29 (SEQ ID NO:621), DOM9-155-30 (SEQ ID NO:622), DOM9-155-31 (SEQ ID NO:623), DOM9-155-32 (SEQ ID NO:624), DOM9-155-33 (SEQ ID NO:625), DOM9-155-34 (SEQ ID NO:626), DOM9-155-35 (SEQ ID NO:627), DOM9-155-36 (SEQ ID NO:628), DOM9-155-37 (SEQ ID NO:629), DOM9-155-38 (SEQ ID NO:630), DOM9-155-39 (SEQ ID NO:631), DOM9-155-41 (SEQ ID NO:632), DOM9-155-42 (SEQ ID NO:633), DOM9-155-43 (SEQ ID NO:634), DOM9-155-44 (SEQ ID NO:635), DOM9-155-45 (SEQ ID NO:636), DOM9-155-46 (SEQ ID NO:637), DOM9-155-47 (SEQ ID NO:638), DOM9-155-48 (SEQ ID NO:639), DOM9-155-49 (SEQ ID NO:640), DOM9-155-50 (SEQ ID NO:641), DOM9-155-51 (SEQ ID NO:642), DOM9-155-52 (SEQ ID NO:643), DOM9-155-53 (SEQ ID NO:644), DOM9-158 (SEQ ID NO:645), DOM9-160 (SEQ ID NO:646), DOM9-161 (SEQ ID NO:647), DOM9-162 (SEQ ID NO:648), DOM9-163 (SEQ ID NO:649) and DOM9-164 (SEQ ID NO:650).

[0276] In some embodiments, the isolated and/or recombinant nucleic acid comprises a nucleotide sequence encoding a ligand that has binding specificity for IL-4, as described herein, wherein said ligand comprises an amino acid sequence that has at least about 80%, at least about 85%, at least about 90%, at least about 91%, at least about 92%, at least about 93%, at least about 94%, at least about 95%, at least about 96%, at least about 97%, at least about 98%, or at least about 99% amino acid sequence identity with the amino acid sequence of a dAb selected from the group consisting of DOM9-155-77 (SEQ ID NO:2426), DOM9-155-78 (SEQ ID NO:2427), DOM9-112-204 (SEQ ID NO:2428), DOM9-112-205 (SEQ ID NO:2429), DOM9-112-206 (SEQ ID NO:2430), DOM9-112-207 (SEQ ID NO:2431), DOM9-112-208 (SEQ ID NO:2432), DOM9-112-209 (SEQ ID NO:2433), DOM9-112-210 (SEQ ID NO:2434), DOM9-112-211 (SEQ ID NO:2435), DOM9-112-212 (SEQ ID NO:2436), DOM9-112-213 (SEQ ID NO:2437), DOM9-112-214 (SEQ ID NO:2438), DOM9-112-215 (SEQ ID NO:2439), DOM9-112-216 (SEQ ID NO:2440), DOM9-112-217 (SEQ ID NO:2441), DOM9-112-218 (SEQ ID NO:2442), DOM9-112-219 (SEQ ID NO:2443), DOM9-112-220 (SEQ ID NO:2444), DOM9-112-221 (SEQ ID NO:2445), DOM9-112-222 (SEQ ID NO:2446), DOM9-112-223 (SEQ ID NO:2447), DOM9-112-224 (SEQ ID NO:2448), DOM9-112-225 (SEQ ID NO:2449), DOM9-112-226 (SEQ ID NO:2450), DOM9-112-227 (SEQ ID NO:2451), DOM9-112-228 (SEQ ID NO:2452), DOM9-112-229 (SEQ ID NO:2453), DOM9-112-230 (SEQ ID NO:2454), DOM9-112-231 (SEQ ID NO:2455), DOM9-112-233 (SEQ ID NO:1734), DOM9-112-232 (SEQ ID NO:1733) and DOM9-112-234 (SEQ ID NO:1735).

[0277] In other embodiments, the isolated and/or recombinant nucleic acid comprises a nucleotide sequence encoding a ligand that has binding specificity for IL-13, as described herein, wherein said ligand comprises an amino acid sequence that has at least about 80%, at least about 85%, at least about 90%, at least about 91%, at least about 92%, at least about 93%, at least about 94%, at least about 95%, at least about 96%, at least about 97%, at least about 98%, or at least about 99% amino acid sequence identity with the amino acid sequence of a dAb selected from the group consisting of DOM10-53 (SEQ ID NO:967), DOM10-53-1 (SEQ ID NO:968), DOM10-53-2 (SEQ ID NO:969), DOM10-53-3 (SEQ ID NO:970), DOM10-53-4 (SEQ ID NO:971), DOM10-53-5 (SEQ ID NO:972), DOM10-53-6 (SEQ ID NO:973), DOM10-53-7 (SEQ ID NO:974), DOM10-53-8 (SEQ ID NO:975), DOM10-53-9 (SEQ ID NO:976), DOM10-53-10 (SEQ ID NO:977), DOM10-53-11 (SEQ ID NO:978), DOM10-53-12 (SEQ ID NO:979), DOM10-53-13 (SEQ ID NO:980), DOM10-53-14 (SEQ ID NO:981), DOM10-53-15 (SEQ ID NO:982), DOM10-53-16 (SEQ ID NO:983), DOM10-53-17 (SEQ ID NO:984), DOM10-53-18 (SEQ ID NO:985), DOM10-53-19 (SEQ ID NO:986), DOM10-53-20 (SEQ ID NO:987), DOM10-53-21 (SEQ ID NO:988), DOM10-53-122 (SEQ ID NO:989), DOM10-53-123 (SEQ ID NO:990), DOM10-53-24 (SEQ ID NO:991), DOM10-53-25 (SEQ ID NO:992), DOM10-53-26 (SEQ ID NO:993), DOM10-53-27 (SEQ ID NO:994), DOM10-53-28 (SEQ ID NO:995), DOM10-53-29 (SEQ ID NO:996), DOM10-53-30 (SEQ ID NO:997), DOM10-53-31 (SEQ ID NO:998), DOM10-53-32 (SEQ ID NO:1999), DOM10-53-43 (SEQ ID NO:1000), DOM10-53-44 (SEQ ID NO:1001), DOM10-53-45 (SEQ ID NO:1002), DOM10-53-46 (SEQ ID NO:1003), DOM10-53-47 (SEQ ID NO:1004), DOM10-53-48 (SEQ ID NO:1005), DOM10-53-49 (SEQ ID NO:1006), DOM10-53-50 (SEQ ID NO:1007), DOM10-53-51 (SEQ ID NO:1008), DOM10-53-52 (SEQ ID NO:1009), DOM10-53-53 (SEQ ID NO:1010), DOM10-53-54 (SEQ ID NO:1011), DOM10-53-55 (SEQ ID NO:1012), DOM10-53-56 (SEQ ID NO:1013), DOM10-53-57 (SEQ ID NO:1014), DOM10-53-59 (SEQ ID NO:1015), DOM10-53-60 (SEQ ID NO:1016), DOM10-53-61 (SEQ ID NO:1017), DOM10-53-62 (SEQ ID NO:1018), DOM10-53-63 (SEQ ID NO:1019), DOM10-53-64 (SEQ ID NO:1020), DOM10-53-65 (SEQ ID NO:1021), DOM10-53-66 (SEQ ID NO:1022), DOM10-53-67 (SEQ ID NO:1023), DOM10-53-68 (SEQ ID NO:1024), DOM10-53-69 (SEQ ID NO:1025), DOM10-53-70 (SEQ ID NO:1026), DOM10-53-71 (SEQ ID NO:1027), DOM10-53-72 (SEQ ID NO:1028), DOM10-53-73 (SEQ ID NO:1029), DOM10-53-74 (SEQ ID NO:1030), DOM10-53-75 (SEQ ID NO:1031), DOM10-53-76 (SEQ ID NO:1032), DOM10-53-77 (SEQ ID NO:1033), DOM10-53-78 (SEQ ID NO:1034), DOM10-53-79 (SEQ ID NO:1035), DOM10-53-80 (SEQ ID NO:1036), DOM10-53-81 (SEQ ID NO:1037), DOM10-53-82 (SEQ ID NO:1038), DOM10-53-83 (SEQ ID NO:1039), DOM10-53-84 (SEQ ID NO:1040), DOM10-53-85 (SEQ ID NO:1041), DOM10-53-86 (SEQ ID NO:1042), DOM10-53-87 (SEQ ID NO:1043), DOM10-53-88 (SEQ ID NO:1044), DOM10-53-89 (SEQ ID NO:1045), DOM10-53-91 (SEQ ID NO:1046), DOM10-53-92 (SEQ ID NO:1047), DOM10-53-93 (SEQ ID NO:1048), DOM10-53-94 (SEQ ID NO:1049), DOM10-53-95 (SEQ ID NO:1050), DOM10-53-96 (SEQ ID NO:1051), DOM10-53-97 (SEQ ID NO:1052), DOM10-53-98 (SEQ ID NO:1053), DOM10-53-99 (SEQ ID NO:1054), DOM10-53-100 (SEQ ID NO:1055), DOM10-53-103 (SEQ ID NO:1056), DOM10-53-105 (SEQ ID NO:1057), DOM10-53-106 (SEQ ID NO:1058), DOM10-53-108 (SEQ ID NO:1059), DOM10-53-110 (SEQ ID NO:1060), DOM10-53-111 (SEQ ID NO:1061), DOM10-53-112 (SEQ ID NO:10632), DOM10-53-114 (SEQ ID NO:1063), DOM10-53-115 (SEQ ID NO:1064), DOM10-53-116 (SEQ ID NO:1065), DOM10-53-117 (SEQ ID NO:1066), DOM10-53-119 (SEQ ID NO:1067), DOM10-53-120 (SEQ ID NO:1068), DOM10-53-122 (SEQ ID NO:1069), DOM10-53-201 (SEQ ID NO:1070), DOM10-53-203 (SEQ ID NO:1071), DOM10-53-204 (SEQ ID NO:1072), DOM10-53-205 (SEQ ID NO:1073), DOM10-53-206 (SEQ ID NO:1074), DOM10-53-207 (SEQ ID NO:1075), DOM10-53-208 (SEQ ID NO:1076), DOM10-53-209 (SEQ ID NO:1077), DOM10-53-210 (SEQ ID NO:1078), DOM10-53-211 (SEQ ID NO:1079), DOM10-53-213 (SEQ ID NO:1080), DOM10-53-214 (SEQ ID NO:1081), DOM10-53-215 (SEQ ID NO:1082), DOM10-53-216 (SEQ ID NO:1083), DOM10-53-217 (SEQ ID NO:1084), DOM10-53-1218 (SEQ ID NO:1085), DOM10-53-219 (SEQ ID NO:1086), DOM10-53-220 (SEQ ID NO:1087), DOM10-53-221 (SEQ ID NO:1088), DOM10-53-222 (SEQ ID NO:1089), DOM10-53-223 (SEQ ID NO:1090), DOM10-53-224 (SEQ ID NO:1091), DOM10-53-225 (SEQ ID NO:1092), DOM10-53-226 (SEQ ID NO:1093), DOM10-53-227 (SEQ ID NO:1094), DOM10-53-228 (SEQ ID NO:1095), DOM10-53-229 (SEQ ID NO:1096), DOM10-53-230 (SEQ ID NO:1097), DOM10-53-231 (SEQ ID NO:1098), DOM10-53-232 (SEQ ID NO:1099), DOM10-53-233 (SEQ ID NO:1100), DOM10-53-234 (SEQ ID NO:1101), DOM10-53-235 (SEQ ID NO:1102), DOM10-53-236 (SEQ ID NO:1103), DOM10-53-237 (SEQ ID NO:1104), DOM10-53-238 (SEQ ID NO:1105), DOM10-53-239 (SEQ ID NO:1106), DOM10-53-240 (SEQ ID NO:1107), DOM10-53-241 (SEQ ID NO:1108), DOM10-53-242 (SEQ ID NO:1109), DOM10-53-243 (SEQ ID NO:1110), DOM10-53-244 (SEQ ID NO:111), DOM10-53-245 (SEQ ID NO:1112), DOM10-53-246 (SEQ ID NO:1113), DOM10-53-247 (SEQ ID NO:1114), DOM10-53-248 (SEQ ID NO:1115), DOM10-53-249 (SEQ ID NO:1116), DOM10-53-250 (SEQ ID NO:1117), DOM10-53-251 (SEQ ID NO:1118), DOM10-53-252 (SEQ ID NO:119), DOM10-53-253 (SEQ ID NO:1120), DOM10-53-254 (SEQ ID NO:1121), DOM10-53-255 (SEQ ID NO:1122), DOM10-53-256 (SEQ ID NO:1123), DOM10-53-257 (SEQ ID NO:1124), DOM10-53-258 (SEQ ID NO:1125), DOM10-53-259 (SEQ ID NO:1126), DOM10-53-260 (SEQ ID NO:1127), DOM10-53-261 (SEQ ID NO:1128), DOM10-53-262 (SEQ ID NO:1129), DOM10-53-263 (SEQ ID NO:1130), DOM10-53-264 (SEQ ID NO:1131), DOM10-53-265 (SEQ ID NO:1132), DOM10-53-266 (SEQ ID NO:1133), DOM10-53-267 (SEQ ID NO:1134), DOM10-53-268 (SEQ ID NO:1135), DOM10-53-269 (SEQ ID NO:1136), DOM10-53-270 (SEQ ID NO:1137), DOM10-53-271 (SEQ ID NO:1138), DOM10-53-272 (SEQ ID NO:1139), DOM10-53-273 (SEQ ID NO:1140), DOM10-53-274 (SEQ ID NO:1141), DOM10-53-275 (SEQ ID NO:1142), DOM10-53-276 (SEQ ID NO:1143), DOM10-53-277 (SEQ ID NO:1144), DOM10-53-278 (SEQ ID NO:1145), DOM10-53-279 (SEQ ID NO:1146), DOM10-53-280 (SEQ ID NO:1147), DOM10-53-281 (SEQ ID NO:1148), DOM10-53-282 (SEQ ID NO:1149), DOM10-53-283 (SEQ ID NO:1150), DOM10-53-284 (SEQ ID NO:1151), DOM10-53-285 (SEQ ID NO:1152), DOM10-53-286 (SEQ ID NO:1153), DOM10-53-287 (SEQ ID NO:1154), DOM10-53-288 (SEQ ID NO:1155), DOM10-53-289 (SEQ ID NO:1156), DOM10-53-290 (SEQ ID NO:1157), DOM10-53-291 (SEQ ID NO:1158), DOM10-53-292 (SEQ ID NO:1159), DOM10-53-293 (SEQ ID NO:1160), DOM10-53-294 (SEQ ID NO:1161), DOM10-53-295 (SEQ ID NO:1162), DOM10-53-296 (SEQ ID NO:1163), DOM10-53-297 (SEQ ID NO:1164), DOM10-53-298 (SEQ ID NO:1165), DOM10-53-299 (SEQ ID NO:166), DOM10-53-300 (SEQ ID NO:1167), DOM10-53-301 (SEQ ID NO:1168), DOM10-53-302 (SEQ ID NO:1169), DOM10-53-303 (SEQ ID NO:1170), DOM10-53-304 (SEQ ID NO:1171), DOM10-53-305 (SEQ ID NO:1172), DOM10-53-306 (SEQ ID NO:1173), DOM10-53-307 (SEQ ID NO:1174), DOM10-53-308 (SEQ ID NO:1175), DOM10-53-309 (SEQ ID NO:1176), DOM10-53-310 (SEQ ID NO:11787), DOM10-53-311 (SEQ ID NO:1178), DOM10-53-312 (SEQ ID NO:1179), DOM10-53-314 (SEQ ID NO:1180), DOM10-53-315 (SEQ ID NO:1181), DOM10-53-316 (SEQ ID NO:1182), DOM10-53-317 (SEQ ID NO:1183), DOM10-53-318 (SEQ ID NO:1184), DOM10-53-319 (SEQ ID NO:1185), DOM10-53-320 (SEQ ID NO:1186), DOM10-53-321 (SEQ ID NO:1187), DOM10-53-322 (SEQ ID NO:1188), DOM10-53-323 (SEQ ID NO:1189), DOM10-53-324 (SEQ ID NO:1190), DOM10-53-325 (SEQ ID NO:1191), DOM10-53-326 (SEQ ID NO:1192), DOM10-53-327 (SEQ ID NO:1193), DOM10-53-328 (SEQ ID NO:1194), DOM10-53-329 (SEQ ID NO:1195), DOM10-53-330 (SEQ ID NO:1196), DOM10-53-331 (SEQ ID NO:1197), DOM10-53-333 (SEQ ID NO:1198), DOM10-53-334 (SEQ ID NO:1199), DOM10-53-336 (SEQ ID NO:1200), DOM10-53-337 (SEQ ID NO:1201), DOM10-53-338 (SEQ ID NO:1202), DOM10-53-339 (SEQ ID NO:1203), DOM10-53-340 (SEQ ID NO:1204), DOM10-53-341 (SEQ ID NO:1205), DOM10-53-342 (SEQ ID NO:1206), DOM10-53-343 (SEQ ID NO:1207), DOM10-53-344 (SEQ ID NO:1208), DOM10-53-345 (SEQ ID NO:1209), DOM10-53-346 (SEQ ID NO:1210), DOM10-53-347 (SEQ ID NO:1211), DOM10-53-348 (SEQ ID NO:1212), DOM10-53-349 (SEQ ID NO:1213), DOM10-53-350 (SEQ ID NO:1214), DOM10-53-351 (SEQ ID NO:1215), DOM10-53-352 (SEQ ID NO:1216), DOM10-53-353 (SEQ ID NO:1217), DOM10-53-354 (SEQ ID NO:1218), DOM10-53-355 (SEQ ID NO: 1219), DOM10-53-356 (SEQ ID NO:1220), DOM10-53-357 (SEQ ID NO:1221), DOM10-53-358 (SEQ ID NO:1222), DOM10-53-359 (SEQ ID NO:1223), DOM10-53-360 (SEQ ID NO:1224), DOM10-53-361 (SEQ ID NO:1225), DOM10-53-362 (SEQ ID NO:1226), DOM10-53-363 (SEQ ID NO:1227), DOM10-53-364 (SEQ ID NO:1228), DOM10-53-365 (SEQ ID NO:1229), DOM10-53-366 (SEQ ID NO:1230), DOM10-53-367 (SEQ ID NO:1231), DOM10-53-368 (SEQ ID NO:1232), DOM10-53-369 (SEQ ID NO:1233), DOM10-53-370 (SEQ ID NO:1234), DOM10-53-371 (SEQ ID NO:1235), DOM10-53-372 (SEQ ID NO:1236), DOM10-53-373 (SEQ ID NO:1237), DOM10-53-374 (SEQ ID NO:1238), DOM10-53-375 (SEQ ID NO:1239), DOM10-53-376 (SEQ ID NO:1240), DOM10-53-377 (SEQ ID NO:1241), DOM10-53-378 (SEQ ID NO:1242), DOM10-53-379 (SEQ ID NO:1243), DOM10-53-380 (SEQ ID NO:1244), DOM10-53-381 (SEQ ID NO:1245), DOM10-53-382 (SEQ ID NO:1246), DOM10-53-383 (SEQ ID NO:1247), DOM10-53-384 (SEQ ID NO:1248), DOM10-53-385 (SEQ ID NO:1249), DOM10-53-386 (SEQ ID NO:1250), DOM10-53-387 (SEQ ID NO:1251), DOM10-53-388 (SEQ ID NO:1252), DOM10-53-389 (SEQ ID NO:1253), DOM10-53-390 (SEQ ID NO:1254), DOM10-53-391 (SEQ ID NO:1255), DOM10-53-392 (SEQ ID NO:1256), DOM10-53-393 (SEQ ID NO:1257), DOM10-53-394 (SEQ ID NO:1258), DOM10-53-395 (SEQ ID NO:1259), DOM10-53-396 (SEQ ID NO:1260), DOM10-53-400 (SEQ ID NO:1261), DOM10-53-401 (SEQ ID NO:1262), DOM10-53-402 (SEQ ID NO:1263), DOM10-53-403 (SEQ ID NO:1264), DOM10-53-404 (SEQ ID NO:1265), DOM10-53-405 (SEQ ID NO:1266), DOM10-53-406 (SEQ ID NO:1267), DOM10-53-407 (SEQ ID NO:1268), DOM10-53-408 (SEQ ID NO:1269), DOM10-53-409 (SEQ ID NO:1270), DOM10-53-410 (SEQ ID NO:1271), DOM10-53-411 (SEQ ID NO:1272), DOM10-53-412 (SEQ ID NO:1273), DOM10-53-413 (SEQ ID NO:1274), DOM10-53-414 (SEQ ID NO:1275), DOM10-53-415 (SEQ ID NO:1276), DOM10-53-416 (SEQ ID NO:1277), DOM10-53-417 (SEQ ID NO:1278), DOM10-53-418 (SEQ ID NO:1279), DOM10-53-419 (SEQ ID NO:1280), DOM10-53-420 (SEQ ID NO:1281), DOM10-53-421 (SEQ ID NO:1282), DOM10-168 (SEQ ID NO:1508), DOM10-169 (SEQ ID NO:1509), DOM10-176 (SEQ ID NO:1510), DOM10-176-1 (SEQ ID NO:1511), DOM10-176-2 (SEQ ID NO:1512), DOM10-173 (SEQ ID NO:1513), DOM10-176-4 (SEQ ID NO:1514), DOM10-176-5 (SEQ ID NO:1515), DOM10-176-6 (SEQ ID NO:1516), DOM10-176-23 (SEQ ID NO:1517), DOM10-176-24 (SEQ ID NO:1518), DOM10-176-25 (SEQ ID NO:1519), DOM10-176-26 (SEQ ID NO:1520), DOM10-176-27 (SEQ ID NO:1521), DOM10-176-28 (SEQ ID NO:1522), DOM10-176-29 (SEQ ID NO:1523), DOM10-176-30 (SEQ ID NO:1524), DOM10-176-31 (SEQ ID NO:1525), DOM10-176-32 (SEQ ID NO:1526), DOM10-176-33 (SEQ ID NO:1527), DOM10-176-34 (SEQ ID NO:1528), DOM10-176-35 (SEQ ID NO:1529), DOM10-176-36 (SEQ ID NO:1530), DOM10-176-37 (SEQ ID NO:1531), DOM10-176-38 (SEQ ID NO:1532), DOM10-176-39 (SEQ ID NO:1533), DOM10-176-40 (SEQ ID NO:1534), DOM10-176-101 (SEQ ID NO:1535), DOM10-176-102 (SEQ ID NO:1536), DOM10-176-103 (SEQ ID NO:1537), DOM10-176-104 (SEQ ID NO:1538), DOM10-176-105 (SEQ ID NO:1539), DOM10-176-106 (SEQ ID NO:1540), DOM10-176-107 (SEQ ID NO:1541), DOM10-176-108 (SEQ ID NO:1542), DOM10-176-109 (SEQ ID NO:1543), DOM10-176-110 (SEQ ID NO:1544), DOM10-176-111 (SEQ ID NO:1545), DOM10-176-112 (SEQ ID NO:1546), DOM10-176-113 (SEQ ID NO:1547), DOM10-176-114 (SEQ ID NO:1548), DOM10-176-115 (SEQ ID NO:1549), DOM10-176-116 (SEQ ID NO:1550), DOM10-176-117 (SEQ ID NO:1551), DOM10-176-500 (SEQ ID NO:1552), DOM10-176-501 (SEQ ID NO:1553), DOM10-176-502 (SEQ ID NO:1554), DOM10-176-503 (SEQ ID NO:1555), DOM10-176-504 (SEQ ID NO:1556), DOM10-176-505 (SEQ ID NO:1557), DOM10-176-506 (SEQ ID NO:1558), DOM10-176-507 (SEQ ID NO:1559), DOM10-176-508 (SEQ ID NO:1560), DOM10-176-509 (SEQ ID NO:1561), DOM10-176-510 (SEQ ID NO:1562), DOM10-176-511 (SEQ ID NO:1563), DOM10-176-512 (SEQ ID NO:1564), DOM10-176-513 (SEQ ID NO:1565), DOM10-176-514 (SEQ ID NO:1566), DOM10-176-515 (SEQ ID NO:1567), DOM10-176-516 (SEQ ID NO:1568), DOM10-176-517 (SEQ ID NO:1569), DOM10-176-518 (SEQ ID NO:1570), DOM10-176-519 (SEQ ID NO:1571), DOM10-176-520 (SEQ ID NO:1572), DOM10-176-521 (SEQ ID NO:1573), DOM10-176-522 (SEQ ID NO:1574), DOM10-176-523 (SEQ ID NO:1575), DOM10-176-524 (SEQ ID NO:1576), DOM10-176-525 (SEQ ID NO:1577), DOM10-176-526 (SEQ ID NO:1578), DOM10-176-527 (SEQ ID NO:1579), DOM10-176-528 (SEQ ID NO:1580), DOM10-176-529 (SEQ ID NO:1581), DOM10-176-530 (SEQ ID NO:1582), DOM10-176-531 (SEQ ID NO:1583), DOM10-176-532 (SEQ ID NO:1584), DOM10-176-533 (SEQ ID NO:1585), DOM10-176-534 (SEQ ID NO:1586), DOM10-176-535 (SEQ ID NO:1587), DOM10-176-536 (SEQ ID NO:1588), DOM10-176-537 (SEQ ID NO:1589), DOM10-176-538 (SEQ ID NO:1590), DOM10-176-539 (SEQ ID NO:1591), DOM10-176-540 (SEQ ID NO:1592), DOM10-176-541 (SEQ ID NO:1593), DOM10-176-542 (SEQ ID NO:1594), DOMO-176-543 (SEQ ID NO:1595), DOM10-176-544 (SEQ ID NO:1596), DOM10-176-545 (SEQ ID NO:1597), DOM10-176-546 (SEQ ID NO:1598), DOM10-176-547 (SEQ ID NO:1599), DOM10-176-548 (SEQ ID NO:1600), DOM10-176-549 (SEQ ID NO:1601), DOM10-176-550 (SEQ ID NO:1602), DOM10-176-551 (SEQ ID NO:1603), DOMO-176-552 (SEQ ID NO:1604), DOM10-176-553 (SEQ ID NO:1605), DOM10-176-554 (SEQ ID NO:1606), DOM10-176-555 (SEQ ID NO:1607), DOM10-176-556 (SEQ ID NO:1608), DOM10-176-557 (SEQ ID NO:1609), DOM10-176-558 (SEQ ID NO:1610), DOM10-176-559 (SEQ ID NO:1611), DOM10-176-560 (SEQ ID NO:1612), DOM10-176-561 (SEQ ID NO:1613), DOM10-176-562 (SEQ ID NO:1614), DOM10-176-563 (SEQ ID NO:1615), DOM10-176-564 (SEQ ID NO:1616), DOM10-176-565 (SEQ ID NO:1617), DOM10-176-566 (SEQ ID NO:1618), DOM10-176-567 (SEQ ID NO:1619), DOM10-176-568 (SEQ ID NO:1620), DOM10-176-569 (SEQ ID NO:1621), DOM10-176-570 (SEQ ID NO:1622), DOM10-176-571 (SEQ ID NO:1623), DOM10-176-572 (SEQ ID NO:1624), DOM10-176-573 (SEQ ID NO:1625), DOM10-176-574 (SEQ ID NO:1626), DOM10-176-575 (SEQ ID NO:1627), DOM10-176-576 (SEQ ID NO:1628), DOM10-176-577 (SEQ ID NO:1629), DOM10-176-578 (SEQ ID NO:1630), DOM10-176-579 (SEQ ID NO:1631), DOM10-176-580 (SEQ ID NO:1632), DOM10-176-581 (SEQ ID NO:1633), DOM10-176-582 (SEQ ID NO:1634), DOM10-176-583 (SEQ ID NO:1635), DOM10-176-584 (SEQ ID NO:1636), DOM10-176-585 (SEQ ID NO:1637), DOM10-176-586 (SEQ ID NO:1638), DOM10-176-587 (SEQ ID NO:1639), DOM10-176-588 (SEQ ID NO:1640), DOM10-176-589 (SEQ ID NO:1641), DOMO-176-590 (SEQ ID NO:1642), DOM10-176-591 (SEQ ID NO:1643), DOM10-176-592 (SEQ ID NO:1644), DOM10-176-593 (SEQ ID NO:1645), DOM10-176-594 (SEQ ID NO:1646), DOM10-176-595 (SEQ ID NO:1647), DOM10-176-596 (SEQ ID NO:1648), DOM10-176-597 (SEQ ID NO:1649), DOM10-176-598 (SEQ ID NO:1650), DOM10-176-599 (SEQ ID NO:1651), DOM10-176-600 (SEQ ID NO:1652), DOM10-176-601 (SEQ ID NO:1653), DOMO-176-602 (SEQ ID NO:1654), DOM10-176-603 (SEQ ID NO:1655), DOMO-176-604 (SEQ ID NO:1656), DOM10-176-605 (SEQ ID NO:1657), DOM10-176-606 (SEQ ID NO:1658), DOM10-176-607 (SEQ ID NO:1659), DOM10-176-608 (SEQ ID NO:1660), DOM10-176-609 (SEQ ID NO:1661), DOM10-176-610 (SEQ ID NO:1662), DOMO-176-611 (SEQ ID NO:1663), DOM10-176-612 (SEQ ID NO:1664), DOM10-176-613 (SEQ ID NO:1665), DOM10-176-614 (SEQ ID NO:1666), DOM10-176-615 (SEQ ID NO:1667), DOMO-176-616 (SEQ ID NO:1668), DOM10-176-617 (SEQ ID NO:1669), DOM10-176-618 (SEQ ID NO:1670), DOM10-176-619 (SEQ ID NO:1671), DOM10-176-620 (SEQ ID NO:1672), DOM10-176-621 (SEQ ID NO:1673), DOM10-176-622 (SEQ ID NO:1674), DOM10-176-623 (SEQ ID NO:1675), DOM10-176-624 (SEQ ID NO:1676), DOM10-176-625 (SEQ ID NO:1677), DOM10-176-626 (SEQ ID NO:1678), DOM10-176-627 (SEQ ID NO:1679), DOM10-176-628 (SEQ ID NO:1680), DOM10-176-629 (SEQ ID NO:1681), DOM10-176-630 (SEQ ID NO:1682), DOM10-176-631 (SEQ ID NO:1683), DOM10-176-632 (SEQ ID NO:1684), DOM10-176-633 (SEQ ID NO:1685), DOM10-176-634 (SEQ ID NO:1686), DOM10-176-635 (SEQ ID NO:1687), DOM10-176-636 (SEQ ID NO:1688), DOM10-176-637 (SEQ ID NO:1689), DOM10-176-638 (SEQ ID NO:1690), DOM10-176-639 (SEQ ID NO:1691), DOM10-176-640 (SEQ ID NO:1692), DOM10-176-641 (SEQ ID NO:1693), DOM10-176-643 (SEQ ID NO:1694), DOM10-176-644 (SEQ ID NO:1695), DOM10-176-645 (SEQ ID NO:1696), DOM10-176-646 (SEQ ID NO:1697), DOM10-176-647 (SEQ ID NO:1698), DOM10-176-648 (SEQ ID NO:1699), DOM10-176-649 (SEQ ID NO:1700), DOM10-176-650 (SEQ ID NO:1701), DOM10-176-651 (SEQ ID NO:1702), DOM10-176-652 (SEQ ID NO:1703), DOM10-176-653 (SEQ ID NO:1704), DOM10-176-654 (SEQ ID NO:1705), DOM10-176-655 (SEQ ID NO:1706), DOM10-176-656 (SEQ ID NO:1707), DOM10-176-657 (SEQ ID NO:1708), DOM10-176-658 (SEQ ID NO:1709), DOM10-176-659 (SEQ ID NO:1710), DOM10-176-660 (SEQ ID NO:1711), DOM10-176-661 (SEQ ID NO:1712), DOM10-176-662 (SEQ ID NO:1713), DOM10-176-663 (SEQ ID NO:1714), DOM10-176-664 (SEQ ID NO:1715), DOM10-176-665 (SEQ ID NO:1716), DOM10-176-666 (SEQ ID NO:1717), DOM10-176-667 (SEQ ID NO:1718), DOMO-176-668 (SEQ ID NO:1719), DOM10-176-669 (SEQ ID NO:1720), DOM10-176-670 (SEQ ID NO:1721), DOM10-176-671 (SEQ ID NO:1722), DOM10-176-672 (SEQ ID NO:1723), DOM10-176-673 (SEQ ID NO:1724), DOM10-176-674 (SEQ ID NO:1725), DOM10-176-675 (SEQ ID NO:1726), DOM10-253 (SEQ ID NO:1727), DOM10-255 (SEQ ID NO:1728), DOM10-272 (SEQ ID NO:1729), DOM10-307 (SEQ ID NO:1730), DOM10-319 (SEQ ID NO:1731) and DOM10-319-1 (SEQ ID NO:1732.

[0278] In other embodiments, the isolated and/or recombinant nucleic acid comprises a nucleotide sequence encoding a ligand that has binding specificity for IL-13, as described herein, wherein said ligand comprises an amino acid sequence that has at least about 80%, at least about 85%, at least about 90%, at least about 91%, at least about 92%, at least about 93%, at least about 94%, at least about 95%, at least about 96%, at least about 97%, at least about 98%, or at least about 99% amino acid sequence identity with the amino acid sequence of a dAb selected from the group consisting of DOM10-236 (SEQ ID NO:2129), DOM10-238 (SEQ ID NO:2130), DOM10-241 (SEQ ID NO:2131), DOM10-245 (SEQ ID NO:2132), DOM10-249 (SEQ ID NO:2133), DOM10-250 (SEQ ID NO:2134), DOM10-251 (SEQ ID NO:2135), DOM10-254 (SEQ ID NO:2136), DOM10-256 (SEQ ID NO:2137), DOM10-259 (SEQ ID NO:2138), DOM10-260 (SEQ ID NO:2139), DOM10-261 (SEQ ID NO:2140), DOM10-263 (SEQ ID NO:2141), DOM10-264 (SEQ ID NO:2142), DOM10-273 (SEQ ID NO:2143), DOM10-278 (SEQ ID NO:2144), DOM10-279 (SEQ ID NO:2145), DOM10-281 (SEQ ID NO:2146), DOM10-282 (SEQ ID NO:2147), DOM10-283 (SEQ ID NO:2148), DOM10-400 (SEQ ID NO:2149), DOM10-401 (SEQ ID NO:2150), DOM10-402 (SEQ ID NO:2151), DOM10-404 (SEQ ID NO:2152), DOM10-406 (SEQ ID NO:2153), DOM10-407 (SEQ ID NO:2154), DOM10-409 (SEQ ID NO:2155), DOM10-410 (SEQ ID NO:2156), DOM10-414 (SEQ ID NO:2157), DOM10-415 (SEQ ID NO:2158), DOM10-416 (SEQ ID NO:2159), DOM10-418 (SEQ ID NO:2160), DOM10-420 (SEQ ID NO:2161), DOM10-422 (SEQ ID NO:2162), DOM10-423 (SEQ ID NO:2163), DOM10-424 (SEQ ID NO:2164), DOM10-425 (SEQ ID NO:2165), DOM10-426 (SEQ ID NO:2166), DOM10-427 (SEQ ID NO:2167), DOM10-428 (SEQ ID NO:2168), DOM10-429 (SEQ ID NO:2169), DOM10-430 (SEQ ID NO:2170), DOM10-431 (SEQ ID NO:2171), DOM10-432 (SEQ ID NO:2172), DOM10-433 (SEQ ID NO:2173), DOM10-467 (SEQ ID NO:2174), DOM10-468 (SEQ ID NO:2175), DOM10-469 (SEQ ID NO:2176), DOM10-470 (SEQ ID NO:2177), DOM10-234 (SEQ ID NO:2178), DOM10-235 (SEQ ID NO:2179), DOM10-237 (SEQ ID NO:2180), DOM10-239 (SEQ ID NO:2181), DOM10-240 (SEQ ID NO:2182), DOM10-242 (SEQ ID NO:2183), DOM10-243 (SEQ ID NO:2184), DOM10-244 (SEQ ID NO:2185), DOM10-246 (SEQ ID NO:2186), DOM10-247 (SEQ ID NO:2187), DOM10-248 (SEQ ID NO:2188), DOM10-252 (SEQ ID NO:2189), DOM10-257 (SEQ ID NO:2190), DOM10-258 (SEQ ID NO:2191), DOM10-262 (SEQ ID NO:2192), DOM10-265 (SEQ ID NO:2193), DOM10-266 (SEQ ID NO:2194), DOM10-274 (SEQ ID NO:2195), DOM10-275 (SEQ ID NO:2196), DOM10-276 (SEQ ID NO:2197), DOM10-277 (SEQ ID NO:2198), DOM10-280 (SEQ ID NO:2199), DOM10-403 (SEQ ID NO:2200), DOM10-405 (SEQ ID NO:2201), DOM10-408 (SEQ ID NO:2202), DOM10-411 (SEQ ID NO:2203), DOM10-412 (SEQ ID NO:2204), DOM10-413 (SEQ ID NO:2205), DOM10-417 (SEQ ID NO:2206), DOM10-419 (SEQ ID NO:2207), DOM10-472 (SEQ ID NO:2208), DOM10-203 (SEQ ID NO:2209), DOM10-205 (SEQ ID NO:2210), DOM10-208 (SEQ ID NO:2211), DOM10-218 (SEQ ID NO:2212), DOM10-219 (SEQ ID NO:2213), DOM10-220 (SEQ ID NO:2214), DOM10-225 (SEQ ID NO:2215), DOM10-228 (SEQ ID NO:2216), DOM10-229 (SEQ ID NO:2217), DOM10-230 (SEQ ID NO:2218), DOM10-231 (SEQ ID NO:2219), DOM10-268 (SEQ ID NO:2220), DOM10-201 (SEQ ID NO:2221), DOM10-202 (SEQ ID NO:2222), DOM10-204 (SEQ ID NO:2223), DOM10-206 (SEQ ID NO:2224), DOM10-207 (SEQ ID NO:2225), DOM10-209 (SEQ ID NO:2226), DOM10-210 (SEQ ID NO:2227), DOM10-211 (SEQ ID NO:2228), DOM10-213 (SEQ ID NO:2229), DOM10-214 (SEQ ID NO:2230), DOM10-215 (SEQ ID NO:2231), DOM10-216 (SEQ ID NO:2232), DOM10-217 (SEQ ID NO:2233), DOM10-221 (SEQ ID NO:2234), DOM10-223 (SEQ ID NO:2235), DOM10-224 (SEQ ID NO:2236), DOM10-227 (SEQ ID NO:2237), DOM10-232 (SEQ ID NO:2238), DOM10-267 (SEQ ID NO:2239), DOM10-270 (SEQ ID NO:2240), DOM10-275-1 (SEQ ID NO:2241), DOM10-276-2 (SEQ ID NO:2242), DOM10-276-3 (SEQ ID NO:2243), DOM10-275-3 (SEQ ID NO:2244), DOM10-277-2 (SEQ ID NO:2245), DOM10-277-3 (SEQ ID NO:2246), DOM10-273-1 (SEQ ID NO:2247), DOM10-273-2 (SEQ ID NO:2248), DOM10-275-2 (SEQ ID NO:2249), DOM10-275-4 (SEQ ID NO:2250), DOM10-276-1 (SEQ ID NO:2251), DOM10-276-4 (SEQ ID NO:2252), DOM10-277-1 (SEQ ID NO:2253), DOM10-275-13 (SEQ ID NO:2254), DOM10-275-15 (SEQ ID NO:2255), DOM10-275-20 (SEQ ID NO:2256), DOM10-275-8 (SEQ ID NO:2257), DOM10-276-13 (SEQ ID NO:2258), DOM10-276-14 (SEQ ID NO:2259), DOM10-276-15 (SEQ ID NO:2260), DOM10-276-17 (SEQ ID NO:2261), DOM10-276-7 (SEQ ID NO:2262), DOM10-276-8 (SEQ ID NO:2263), DOM10-275-11 (SEQ ID NO:2264), DOM10-275-12 (SEQ ID NO:2265), DOM10-275-14 (SEQ ID NO:2266), DOM10-275-16 (SEQ ID NO:2267), DOM10-275-17 (SEQ ID NO:2268), DOM10-275-5 (SEQ ID NO:2269), DOM10-275-6 (SEQ ID NO:2270), DOM10-275-7 (SEQ ID NO:2271), DOM10-275-9 (SEQ ID NO:2272), DOM10-276-10 (SEQ ID NO:2273), DOM10-276-11 (SEQ ID NO:2274), DOM10-276-12 (SEQ ID NO:2275), DOM10-276-16 (SEQ ID NO:2276), DOM10-276-5 (SEQ ID NO:2277), DOM10-276-6 (SEQ ID NO:2278), DOM10-276-9 (SEQ ID NO:2279), DOM10-212 (SEQ ID NO:2280), DOM10-53-424 (SEQ ID NO:2281), DOM10-53-425 (SEQ ID NO:2282), DOM10-53-426 (SEQ ID NO:2283), DOM10-53-422 (SEQ ID NO:2284), DOM10-53-423 (SEQ ID NO:2285), DOM10-53-613 (SEQ ID NO:2286), DOM10-53-517 (SEQ ID NO:2287), DOM10-53-519 (SEQ ID NO:2288), DOM10-53-520 (SEQ ID NO:2289), DOM10-53-521 (SEQ ID NO:2290), DOM10-53-522 (SEQ ID NO:2291), DOM10-53-526 (SEQ ID NO:2292), DOM10-53-527 (SEQ ID NO:2293), DOM10-53-528 (SEQ ID NO:2294), DOM10-53-518 (SEQ ID NO:2295), DOM10-53-523 (SEQ ID NO:2296), DOM10-53-524 (SEQ ID NO:2297), DOM10-53-525 (SEQ ID NO:2298), DOM10-53-601 (SEQ ID NO:2299), DOM10-53-602 (SEQ ID NO:2300), DOM10-53-605 (SEQ ID NO:2301), DOM10-53-606 (SEQ ID NO:2302), DOM10-53-607 (SEQ ID NO:2303), DOM10-53-608 (SEQ ID NO:2304), DOM10-53-609 (SEQ ID NO:2305), DOM10-53-610 (SEQ ID NO:2306), DOM10-53-611 (SEQ ID NO:2307), DOM10-53-612 (SEQ ID NO:2308), DOM10-53-603 (SEQ ID NO:2309), DOM10-53-604 (SEQ ID NO:2310), DOM10-53-429 (SEQ ID NO:2311), DOM10-53-432 (SEQ ID NO:2312), DOM10-53-433 (SEQ ID NO:2313), DOM10-53-435 (SEQ ID NO:2314), DOM10-53-430 (SEQ ID NO:2315), DOM10-53-431 (SEQ ID NO:2316), DOM10-53-434 (SEQ ID NO:2317), DOM10-53-436 (SEQ ID NO:2318), DOM10-53-437 (SEQ ID NO:2319), DOM10-53-438 (SEQ ID NO:2320), DOM10-53-440 (SEQ ID NO:2321), DOM10-53-439 (SEQ ID NO:2322), DOM10-53-441 (SEQ ID NO:2323), DOM10-53-442 (SEQ ID NO:2324), DOM10-53-443 (SEQ ID NO:2325), DOM10-53-444 (SEQ ID NO:2326), DOM10-53-445 (SEQ ID NO:2327), DOM10-53-446 (SEQ ID NO:2328), DOM10-53-447 (SEQ ID NO:2329), DOM10-53-449 (SEQ ID NO:2330), DOM10-53-448 (SEQ ID NO:2331), DOM10-53-450 (SEQ ID NO:2332), DOM10-53-451 (SEQ ID NO:2333), DOM10-53-452 (SEQ ID NO:2334), DOM10-53-453 (SEQ ID NO:2335), DOM10-53-454 (SEQ ID NO:2336), DOM10-53-455 (SEQ ID NO:2337), DOM10-53-456 (SEQ ID NO:2338), DOM10-53-457 (SEQ ID NO:2339), DOM10-53-458 (SEQ ID NO:2340), DOM10-53-459 (SEQ ID NO:2341), DOM10-53-461 (SEQ ID NO:2342), DOM10-53-462 (SEQ ID NO:2343), DOM10-53-465 (SEQ ID NO:2344), DOM10-53-466 (SEQ ID NO:2345), DOM10-53-467 (SEQ ID NO:2346), DOM10-53-468 (SEQ ID NO:2347), DOM10-53-460 (SEQ ID NO:2348), DOM10-53-463 (SEQ ID NO:2349), DOM10-53-464 (SEQ ID NO:2350), DOM10-53-469 (SEQ ID NO:2351), DOM10-53-471 (SEQ ID NO:2352), DOM10-53-470 (SEQ ID NO:2353), DOM10-53-533 (SEQ ID NO:2354), DOM10-53-534 (SEQ ID NO:2355), DOM10-53-535 (SEQ ID NO:2356), DOM10-53-537 (SEQ ID NO:2357), DOM10-53-538 (SEQ ID NO:2358), DOM10-53-539 (SEQ ID NO:2359), DOM10-53-540 (SEQ ID NO:2360), DOM10-53-531 (SEQ ID NO:2361), DOM10-53-532 (SEQ ID NO:2362), DOM10-53-536 (SEQ ID NO:2363), DOM10-53-542 (SEQ ID NO:2364), DOM10-53-541 (SEQ ID NO:2365), DOM10-53-473 (SEQ ID NO:2366), DOM10-53-472 (SEQ ID NO:2367), DOM10-53-475 (SEQ ID NO:2368), DOM10-53-474 (SEQ ID NO:2369), DOM10-53-543 (SEQ ID NO:2370), DOM10-53-544 (SEQ ID NO: 2371), DOM10-53-545 (SEQ ID NO:2372), DOM10-53-548 (SEQ ID NO:2373), DOM10-53-546 (SEQ ID NO:2374), DOM10-53-549 (SEQ ID NO:2375), DOM10-53-547 (SEQ ID NO:2376), DOM10-53-550 (SEQ ID NO:2377), DOM10-53-551 (SEQ ID NO:2378), DOM10-53-560 (SEQ ID NO:2379), DOM10-53-565 (SEQ ID NO:2380), DOM10-53-559 (SEQ ID NO:2381), DOM10-53-561 (SEQ ID NO:2382), DOM10-53-562 (SEQ ID NO:2383), DOM10-53-563 (SEQ ID NO:2384), DOM10-53-564 (SEQ ID NO:2385), DOM10-53-566 (SEQ ID NO:2386), DOM10-53-554 (SEQ ID NO:2387), DOM10-53-552 (SEQ ID NO:2388), DOM10-53-553 (SEQ ID NO:2389), DOM10-53-558 (SEQ ID NO:2390), DOM10-53-556 (SEQ ID NO:2391) and DOM10-53-557 (SEQ ID NO:2392).

[0279] In other embodiments, the isolated and/or recombinant nucleic acid comprises a nucleotide sequence encoding a ligand that has binding specificity for IL-13, as described herein, wherein said ligand comprises an amino acid sequence that has at least about 70%, at least about 75%, at least about 80%, at least about 85%, at least about 90%, at least about 91%, at least about 92%, at least about 93%, at least about 94%, at least about 95%, at least about 96%, at least about 97%, at least about 98%, or at least about 99% amino acid sequence identity with the amino acid sequence of a dAb selected from the group consisting of DOM10-53-474 (SEQ ID NO:2369), DOM10-275-78 (SEQ ID NO:2456), DOM10-275-94 (SEQ ID NO:2457), DOM10-275-99 (SEQ ID NO:2458), DOM10-275-100 (SEQ ID NO:2459) and DOM10-275-101 (SEQ ID NO:2460).

[0280] In other embodiments, the isolated and/or recombinant nucleic acid comprises a nucleotice sequence encoding a ligand that has binding specificity for IL-4, as described herein, wherein said nucleotide sequence has at least about 70%, at least about 75%, at least about 80%, at least about 85%, at least about 90%, at least about 91%, at least about 92%, at least about 93%, at least about 94%, at least about 95%, at least about 96%, at least about 97%, at least about 98%, or at least about 99% nucleotide sequence identity with a nucleotide sequence encoding an anti-IL-4 dAb selected from the group consisting of DOM9-15 (SEQ ID NO:1), DOM9-17 (SEQ ID NO:2), DOM9-23 (SEQ ID NO:3), DOM9-24 (SEQ ID NO:4), DOM9-25 (SEQ ID NO:5), DOM9-27 (SEQ ID NO:6), DOM9-28 (SEQ ID NO:7), DOM9-29 (SEQ ID NO:8), DOM9-30 (SEQ ID NO:9), DOM9-31 (SEQ ID NO:10), DOM9-32 (SEQ ID NO:11), DOM9-33 (SEQ ID NO:12), DOM9-50 (SEQ ID NO:13), DOM9-57 (SEQ ID NO:14), DOM9-59 (SEQ ID NO:15), DOM9-63 (SEQ ID NO:16), DOM9-67 (SEQ ID NO:17), DOM9-68 (SEQ ID NO:18), DOM9-70 (SEQ ID NO:19), DOM9-79 (SEQ ID NO:20), DOM9-82 (SEQ ID NO:21), DOM9-86 (SEQ ID NO:22), DOM9-94 (SEQ ID NO:23), DOM9-108 (SEQ ID NO:24), DOM9-112 (SEQ ID NO:25), DOM9-112-1 (SEQ ID NO:26), DOM9-112-2 (SEQ ID NO:27), DOM9-112-3 (SEQ ID NO:28), DOM9-112-4 (SEQ ID NO:29), DOM9-112-5 (SEQ ID NO:30), DOM9-112-6 (SEQ ID NO:31), DOM9-112-7 (SEQ ID NO:32), DOM9-112-8 (SEQ ID NO:33), DOM9-112-9 (SEQ ID NO:34), DOM9-112-10 (SEQ ID NO:35), DOM9-112-11 (SEQ ID NO:36), DOM9-112-12 (SEQ ID NO:37), DOM9-112-13 (SEQ ID NO:38), DOM9-112-14 (SEQ ID NO:39), DOM9-112-15 (SEQ ID NO:40), DOM9-112-16 (SEQ ID NO:41), DOM9-112-17 (SEQ ID NO:42), DOM9-112-18 (SEQ ID NO:43), DOM9-112-19 (SEQ ID NO:44), DOM9-112-20 (SEQ ID NO:45), DOM9-112-21 (SEQ ID NO:46), DOM9-112-22 (SEQ ID NO:47), DOM9-112-23 (SEQ ID NO:48), DOM9-112-25 (SEQ ID NO:49), DOM9-112-81 (SEQ ID NO:50), DOM9-112-82 (SEQ ID NO:51), DOM9-112-83 (SEQ ID NO:52), DOM9-112-84 (SEQ ID NO:53), DOM9-112-85 (SEQ ID NO:54), DOM9-112-86 (SEQ ID NO:55), DOM9-112-87 (SEQ ID NO:56), DOM9-112-88 (SEQ ID NO:57), DOM9-112-89 (SEQ ID NO:58), DOM9-112-90 (SEQ ID NO:59), DOM9-112-91 (SEQ ID NO:60), DOM9-112-92 (SEQ ID NO:61), DOM9-112-93 (SEQ ID NO:62), DOM9-112-94 (SEQ ID NO:63), DOM9-112-95 (SEQ ID NO:64), DOM9-112-96 (SEQ ID NO:65), DOM9-112-97 (SEQ ID NO:66), DOM9-112-98 (SEQ ID NO:67), DOM9-112-99 (SEQ ID NO:68), DOM9-112-100 (SEQ ID NO:69), DOM9-112-101 (SEQ ID NO:70), DOM9-112-102 (SEQ ID NO:71), DOM9-112-103 (SEQ ID NO:72), DOM9-112-104 (SEQ ID NO:73), DOM9-112-105 (SEQ ID NO:74), DOM9-112-106 (SEQ ID NO:75), DOM9-112-107 (SEQ ID NO:76), DOM9-112-108 (SEQ ID NO:77), DOM9-112-109 (SEQ ID NO:78), DOM9-112-110 (SEQ ID NO:79), DOM9-112-111 (SEQ ID NO:80), DOM9-112-112 (SEQ ID NO:81), DOM9-112-113 (SEQ ID NO:82), DOM9-112-114 (SEQ ID NO:83), DOM9-112-115 (SEQ ID NO:84), DOM9-112-116 (SEQ ID NO:85), DOM9-112-117 (SEQ ID NO:86), DOM9-112-118 (SEQ ID NO:87), DOM9-112-119 (SEQ ID NO:88), DOM9-112-120 (SEQ ID NO:89), DOM9-112-121 (SEQ ID NO:90), DOM9-112-122 (SEQ ID NO:91), DOM9-112-123 (SEQ ID NO:92), DOM9-112-124 (SEQ ID NO:93), DOM9-112-125 (SEQ ID NO:94), DOM9-112-126 (SEQ ID NO:95), DOM9-112-127 (SEQ ID NO:96), DOM9-112-128 (SEQ ID NO:97), DOM9-112-134 (SEQ ID NO:98), DOM9-112-135 (SEQ ID NO:99), DOM9-112-136 (SEQ ID NO:100), DOM9-112-137 (SEQ ID NO:101), DOM9-112-138 (SEQ ID NO:102), DOM9-112-140 (SEQ ID NO:103), DOM9-112-141 (SEQ ID NO:104), DOM9-112-142 (SEQ ID NO:105), DOM9-112-143 (SEQ ID NO:106), DOM9-112-144 (SEQ ID NO:107), DOM9-112-145 (SEQ ID NO:108), DOM9-112-146 (SEQ ID NO:109), DOM9-112-147 (SEQ ID NO:110), DOM9-112-148 (SEQ ID NO:111), DOM9-112-149 (SEQ ID NO:112), DOM9-112-150 (SEQ ID NO:113), DOM9-112-151 (SEQ ID NO:114), DOM9-112-152 (SEQ ID NO:115), DOM9-112-153 (SEQ ID NO:116), DOM9-112-154 (SEQ ID NO:117), DOM9-112-155 (SEQ ID NO:118), DOM9-112-156 (SEQ ID NO:119), DOM9-112-157 (SEQ ID NO:120), DOM9-112-158 (SEQ ID NO:121), DOM9-112-159 (SEQ ID NO:122), DOM9-112-160 (SEQ ID NO:123), DOM9-112-161 (SEQ ID NO:124), DOM9-112-162 (SEQ ID NO:125), DOM9-112-163 (SEQ ID NO:126), DOM9-112-164 (SEQ ID NO:127), DOM9-112-165 (SEQ ID NO:128), DOM9-112-166 (SEQ ID NO:129), DOM9-112-167 (SEQ ID NO:130), DOM9-112-168 (SEQ ID NO:131), DOM9-112-169 (SEQ ID NO:132), DOM9-112-170 (SEQ ID NO:133), DOM9-112-171 (SEQ ID NO:134), DOM9-112-172 (SEQ ID NO:135), DOM9-112-173 (SEQ ID NO:136), DOM9-112-174 (SEQ ID NO:137), DOM9-112-175 (SEQ ID NO:138), DOM9-112-176 (SEQ ID NO:139), DOM9-112-177 (SEQ ID NO:140), DOM9-112-178 (SEQ ID NO:141), DOM9-112-179 (SEQ ID NO:142), DOM9-112-180 (SEQ ID NO:143), DOM9-112-181 (SEQ ID NO:144), DOM9-112-182 (SEQ ID NO:145), DOM9-112-183 (SEQ ID NO:146), DOM9-112-184 (SEQ ID NO:147), DOM9-112-185 (SEQ ID NO:148), DOM9-112-186 (SEQ ID NO:149), DOM9-112-187 (SEQ ID NO:150), DOM9-112-188 (SEQ ID NO:151), DOM9-112-189 (SEQ ID NO:152), DOM9-112-190 (SEQ ID NO:153), DOM9-112-191 (SEQ ID NO:154), DOM9-112-192 (SEQ ID NO:155), DOM9-112-193 (SEQ ID NO:156), DOM9-112-194 (SEQ ID NO:157), DOM9-112-195 (SEQ ID NO:158), DOM9-112-196 (SEQ ID NO:159), DOM9-112-197 (SEQ ID NO:160), DOM9-112-198 (SEQ ID NO:161), DOM9-112-199 (SEQ ID NO:162), DOM9-112-200 (SEQ ID NO:163), DOM9-112-201 (SEQ ID NO:164), DOM9-112-202 (SEQ ID NO:165) DOM9-120 (SEQ ID NO:166), DOM9-121 (SEQ ID NO:167), DOM9-122 (SEQ ID NO:168), DOM9-123 (SEQ ID NO:169), DOM9-124 (SEQ ID NO:170), DOM9-125 (SEQ ID NO:171), DOM9-128 (SEQ ID NO:172), DOM9-134 (SEQ ID NO:173), DOM9-136 (SEQ ID NO:174), DOM9-26 (SEQ ID NO:349), DOM9-35 (SEQ ID NO:350), DOM9-36 (SEQ ID NO:351), DOM9-37 (SEQ ID NO:352), DOM9-38 (SEQ ID NO:353), DOM9-39 (SEQ ID NO:354), DOM9-40 (SEQ ID NO:355), DOM9-41 (SEQ ID NO:356), DOM9-43 (SEQ ID NO:357), DOM9-44 (SEQ ID NO:358), DOM9-44-500 (SEQ ID NO:359), DOM9-44-501 (SEQ ID NO:360), DOM9-44-502 (SEQ ID NO:361), DOM9-44-503 (SEQ ID NO:362), DOM9-44-504 (SEQ ID NO:363), DOM9-44-505 (SEQ ID NO:364), DOM9-44-506 (SEQ ID NO:365), DOM9-44-507 (SEQ ID NO:366), DOM9-44-509 (SEQ ID NO:367), DOM9-44-510 (SEQ ID NO:368), DOM9-44-511 (SEQ ID NO:369), DOM9-44-512 (SEQ ID NO:370), DOM9-44-513 (SEQ ID NO:371), DOM9-44-514 (SEQ ID NO:372), DOM9-44-515 (SEQ ID NO:373), DOM9-44-516 (SEQ ID NO:374), DOM9-44-517 (SEQ ID NO:375), DOM9-44-518 (SEQ ID NO:376), DOM9-44-519 (SEQ ID NO:377), DOM9-44-520 (SEQ ID NO:378), DOM9-44-521 (SEQ ID NO:379), DOM9-44-522 (SEQ ID NO:380), DOM9-44-523 (SEQ ID NO:381), DOM9-44-524 (SEQ ID NO:382), DOM9-44-525 (SEQ ID NO:383), DOM9-44-526 (SEQ ID NO:384), DOM9-44-527 (SEQ ID NO:385), DOM9-44-528 (SEQ ID NO:386), DOM9-44-529 (SEQ ID NO:387), DOM9-44-530 (SEQ ID NO:388), DOM9-44-531 (SEQ ID NO:389), DOM9-44-532 (SEQ ID NO:390), DOM9-44-533 (SEQ ID NO:391), DOM9-44-534 (SEQ ID NO:392), DOM9-44-535 (SEQ ID NO:393), DOM9-44-536 (SEQ ID NO:394), DOM9-44-537 (SEQ ID NO:395), DOM9-44-538 (SEQ ID NO:396), DOM9-44-539 (SEQ ID NO:397), DOM9-44-540 (SEQ ID NO:398), DOM9-44-541 (SEQ ID NO:399), DOM9-44-542 (SEQ ID NO:400), DOM9-44-543 (SEQ ID NO:401), DOM9-44-544 (SEQ ID NO:402), DOM9-44-545 (SEQ ID NO:403), DOM9-44-546 (SEQ ID NO:404), DOM9-44-547 (SEQ ID NO:405), DOM9-44-548 (SEQ ID NO:406), DOM9-44-549 (SEQ ID NO:407), DOM9-44-550 (SEQ ID NO:408), DOM9-44-551 (SEQ ID NO:409), DOM9-44-552 (SEQ ID NO:410), DOM9-44-553 (SEQ ID NO:411), DOM9-44-554 (SEQ ID NO:412), DOM9-44-555 (SEQ ID NO:413), DOM9-44-556 (SEQ ID NO:414), DOM9-44-557 (SEQ ID NO:415), DOM9-44-558 (SEQ ID NO:416), DOM9-44-559 (SEQ ID NO:417), DOM9-44-560 (SEQ ID NO:418), DOM9-44-561 (SEQ ID NO:419), DOM9-44-562 (SEQ ID NO:420), DOM9-44-563 (SEQ ID NO:421), DOM9-44-564 (SEQ ID NO:422), DOM9-44-565 (SEQ ID NO:423), DOM9-44-566 (SEQ ID NO:424), DOM9-44-625 (SEQ ID NO:425), DOM9-44-626 (SEQ ID NO:426), DOM9-44-627 (SEQ ID NO:427), DOM9-44-628 (SEQ ID NO:428), DOM9-44-629 (SEQ ID NO:429), DOM9-44-630 (SEQ ID NO:430), DOM9-44-631 (SEQ ID NO:431), DOM9-44-632 (SEQ ID NO:432), DOM9-44-633 (SEQ ID NO:433), DOM9-44-634 (SEQ ID NO:434), DOM9-44-636 (SEQ ID NO:435), DOM9-44-637 (SEQ ID NO:436), DOM9-44-639 (SEQ ID NO:437), DOM9-44-640 (SEQ ID NO:438), DOM9-44-641 (SEQ ID NO:439), DOM9-44-642 (SEQ ID NO:440), DOM9-44-643 (SEQ ID NO:441), DOM9-44-644 (SEQ ID NO:442), DOM9-45 (SEQ ID NO:443), DOM9-46 (SEQ ID NO:444), DOM9-47 (SEQ ID NO:445), DOM9-48 (SEQ ID NO:446), DOM9-143 (SEQ ID NO:447), DOM9-144 (SEQ ID NO:448), DOM9-146 (SEQ ID NO:449), DOM9-152 (SEQ ID NO:450), DOM9-155 (SEQ ID NO:451), DOM9-155-001 (SEQ ID NO:452), DOM9-155-3 (SEQ ID NO:453), DOM9-155-5 (SEQ ID NO:454), DOM9-155-8 (SEQ ID NO:455), DOM9-155-9 (SEQ ID NO:456), DOM9-155-11 (SEQ ID NO:457), DOM9-155-13 (SEQ ID NO:458), DOM9-155-14 (SEQ ID NO:459), DOM9-155-17 (SEQ ID NO:460), DOM9-155-19 (SEQ ID NO:461), DOM9-155-20 (SEQ ID NO:462), DOM9-155-22 (SEQ ID NO:463), DOM9-155-23 (SEQ ID NO:464), DOM9-155-24 (SEQ ID NO:465), DOM9-155-25 (SEQ ID NO:466), DOM9-155-26 (SEQ ID NO:467), DOM9-155-27 (SEQ ID NO:468), DOM9-155-28 (SEQ ID NO:469), DOM9-155-29 (SEQ ID NO:470), DOM9-155-30 (SEQ ID NO:471), DOM9-155-31 (SEQ ID NO:472), DOM9-155-32 (SEQ ID NO:473), DOM9-155-33 (SEQ ID NO:474), DOM9-155-34 (SEQ ID NO:475), DOM9-155-35 (SEQ ID NO:476), DOM9-155-36 (SEQ ID NO:477), DOM9-155-37 (SEQ ID NO:478), DOM9-155-38 (SEQ ID NO:479), DOM9-155-39 (SEQ ID NO:480), DOM9-155-41 (SEQ ID NO:481), DOM9-155-42 (SEQ ID NO:482), DOM9-155-43 (SEQ ID NO:483), DOM9-155-44 (SEQ ID NO:484), DOM9-155-45 (SEQ ID NO:485), DOM9-155-46 (SEQ ID NO:486), DOM9-155-47 (SEQ ID NO:487), DOM9-155-48 (SEQ ID NO:488), DOM9-155-49 (SEQ ID NO:489), DOM9-155-50 (SEQ ID NO:490), DOM9-155-51 (SEQ ID NO:491), DOM9-155-52 (SEQ ID NO:492), DOM9-155-53 (SEQ ID NO:493), DOM9-158 (SEQ ID NO:494), DOM9-160 (SEQ ID NO:495), DOM9-161 (SEQ ID NO:496), DOM9-162 (SEQ ID NO:497), DOM9-163 (SEQ ID NO:498) and DOM9-164 (SEQ ID NO:499). Preferably, nucleotide sequence identity is determined over the whole length of the nucleotice sequence that encodes the selected anti-IL-4 dAb.

[0281] In other embodiments, the isolated and/or recombinant nucleic acid comprises a nucleotice sequence encoding a ligand that has binding specificity for IL-4, as described herein, wherein said nucleotide sequence has at least about 70%, at least about 75%, at least about 80%, at least about 85%, at least about 90%, at least about 91%, at least about 92%, at least about 93%, at least about 94%, at least about 95%, at least about 96%, at least about 97%, at least about 98%, or at least about 99% nucleotide sequence identity with a nucleotide sequence encoding an anti-IL-4 dAb selected from the group consisting of DOM9-155-77 (SEQ ID NO:2393), DOM9-155-78 (SEQ ID NO:2394), DOM9-112-204 (SEQ ID NO:2395), DOM9-112-205 (SEQ ID NO:2396), DOM9-112-206 (SEQ ID NO:2397), DOM9-112-207 (SEQ ID NO:2398), DOM9-112-208 (SEQ ID NO:2399), DOM9-112-209 (SEQ ID NO:2400), DOM9-112-210 (SEQ ID NO:2401), DOM9-112-211 (SEQ ID NO:2402), DOM9-112-212 (SEQ ID NO:2403), DOM9-112-213 (SEQ ID NO:2404), DOM9-112-214 (SEQ ID NO:2405), DOM9-112-215 (SEQ ID NO:2406), DOM9-112-216 (SEQ ID NO:2407), DOM9-112-217 (SEQ ID NO:2408), DOM9-112-218 (SEQ ID NO:2409), DOM9-112-219 (SEQ ID NO:2410), DOM9-112-220 (SEQ ID NO:2411), DOM9-112-221 (SEQ ID NO:2412), DOM9-112-222 (SEQ ID NO:2413), DOM9-112-223 (SEQ ID NO:2414), DOM9-112-224 (SEQ ID NO:2415), DOM9-112-225 (SEQ ID NO:2416), DOM9-112-226 (SEQ ID NO:2417), DOM9-112-227 (SEQ ID NO:2418), DOM9-112-228 (SEQ ID NO:2419), DOM9-112-229 (SEQ ID NO:2420), DOM9-112-230 (SEQ ID NO:2421), DOM9-112-231 (SEQ ID NO:2422), DOM9-112-233 (SEQ ID NO:2423), DOM9-112-232 (SEQ ID NO:2424) and DOM9-112-234 (SEQ ID NO:2425).

[0282] In other embodiments, the isolated and/or recombinant nucleic acid comprises a nucleotice sequence encoding a ligand that has binding specificity for IL-13, as described herein, wherein said nucleotide sequence has at least about 70%, at least about 75%, at least about 80%, at least about 85%, at least about 90%, at least about 91%, at least about 92%, at least about 93%, at least about 94%, at least about 95%, at least about 96%, at least about 97%, at least about 98%, or at least about 99% nucleotide sequence identity with a nucleotide sequence encoding an anti-IL-13 dAb selected from the group consisting of DOM10-53 (SEQ ID NO:651), DOM10-53-1 (SEQ ID NO:652), DOM10-53-2 (SEQ ID NO:653), DOM10-53-3 (SEQ ID NO:654), DOM10-53-4 (SEQ ID NO:655), DOM10-53-5 (SEQ ID NO:656), DOM10-53-6 (SEQ ID NO:657), DOM10-53-7 (SEQ ID NO:658), DOM10-53-8 (SEQ ID NO:659), DOM10-53-9 (SEQ ID NO:660), DOM10-53-10 (SEQ ID NO:661), DOM10-53-11 (SEQ ID NO:662), DOM10-53-12 (SEQ ID NO:663), DOM10-53-13 (SEQ ID NO:664), DOM10-53-14 (SEQ ID NO:665), DOM10-53-15 (SEQ ID NO:666), DOM10-53-16 (SEQ ID NO:667), DOM10-53-17 (SEQ ID NO:668), DOM10-53-18 (SEQ ID NO:669), DOM10-53-19 (SEQ ID NO:670), DOM10-53-20 (SEQ ID NO:671), DOM10-53-21 (SEQ ID NO:672), DOM10-53-122 (SEQ ID NO:673), DOM10-53-123 (SEQ ID NO:674), DOM10-53-24 (SEQ ID NO:675), DOM10-53-25 (SEQ ID NO:676), DOM10-53-26 (SEQ ID NO:677), DOM10-53-27 (SEQ ID NO:678), DOM10-53-28 (SEQ ID NO:679), DOM10-53-29 (SEQ ID NO:680), DOM10-53-30 (SEQ ID NO:681), DOM10-53-31 (SEQ ID NO:682), DOM10-53-32 (SEQ ID NO:683), DOM10-53-43 (SEQ ID NO:684), DOM10-53-44 (SEQ ID NO:685), DOM10-53-45 (SEQ ID NO:686), DOM10-53-46 (SEQ ID NO:687), DOM10-53-47 (SEQ ID NO:688), DOM10-53-48 (SEQ ID NO:689), DOM10-53-49 (SEQ ID NO:690), DOM10-53-50 (SEQ ID NO:691), DOM10-53-51 (SEQ ID NO:692), DOM10-53-52 (SEQ ID NO:693), DOM10-53-53 (SEQ ID NO:694), DOM10-53-54 (SEQ ID NO:695), DOM10-53-55 (SEQ ID NO:696), DOM10-53-56 (SEQ ID NO:697), DOM10-53-57 (SEQ ID NO:698), DOM10-53-59 (SEQ ID NO:699), DOM10-53-60 (SEQ ID NO:700), DOM10-53-61 (SEQ ID NO:701), DOM10-53-62 (SEQ ID NO:702), DOM10-53-63 (SEQ ID NO:703), DOM10-53-64 (SEQ ID NO:704), DOM10-53-65 (SEQ ID NO:705), DOM10-53-66 (SEQ ID NO:706), DOM10-53-67 (SEQ ID NO:707), DOM10-53-68 (SEQ ID NO:708), DOM10-53-69 (SEQ ID NO:709), DOM10-53-70 (SEQ ID NO:710), DOM10-53-71 (SEQ ID NO:711), DOM10-53-72 (SEQ ID NO:712), DOM10-53-73 (SEQ ID NO:713), DOM10-53-74 (SEQ ID NO:714), DOM10-53-75 (SEQ ID NO:715), DOM10-53-76 (SEQ ID NO:716), DOM10-53-77 (SEQ ID NO:717), DOM10-53-78 (SEQ ID NO:718), DOM10-53-79 (SEQ ID NO:719), DOM10-53-80 (SEQ ID NO:720), DOM10-53-81 (SEQ ID NO:721), DOM10-53-82 (SEQ ID NO:722), DOM10-53-83 (SEQ ID NO:723), DOM10-53-84 (SEQ ID NO:724), DOM10-53-85 (SEQ ID NO:725), DOM10-53-86 (SEQ ID NO:726), DOM10-53-87 (SEQ ID NO:727), DOM10-53-88 (SEQ ID NO:728), DOM10-53-89 (SEQ ID NO:729), DOM10-53-91 (SEQ ID NO:730), DOM10-53-92 (SEQ ID NO:731), DOM10-53-93 (SEQ ID NO:732), DOM10-53-94 (SEQ ID NO:733), DOM10-53-95 (SEQ ID NO:734), DOM10-53-96 (SEQ ID NO:735), DOM10-53-97 (SEQ ID NO:736), DOM10-53-98 (SEQ ID NO:737), DOM10-53-99 (SEQ ID NO:738), DOM10-53-100 (SEQ ID NO:739), DOM10-53-103 (SEQ ID NO:740), DOM10-53-105 (SEQ ID NO:741), DOM10-53-106 (SEQ ID NO:742), DOM10-53-108 (SEQ ID NO:743), DOM10-53-110 (SEQ ID NO:744), DOM10-53-111 (SEQ ID NO:745), DOM10-53-112 (SEQ ID NO:746), DOM10-53-114 (SEQ ID NO:747), DOM10-53-115 (SEQ ID NO:748), DOM10-53-116 (SEQ ID NO:749), DOM10-53-117 (SEQ ID NO:750), DOM10-53-119 (SEQ ID NO:751), DOM10-53-120 (SEQ ID NO:752), DOM10-53-122 (SEQ ID NO:753), DOM10-53-201 (SEQ ID NO:754), DOM10-53-203 (SEQ ID NO:755), DOM10-53-204 (SEQ ID NO:756), DOM10-53-205 (SEQ ID NO:757), DOM10-53-206 (SEQ ID NO:758), DOM10-53-207 (SEQ ID NO:759), DOM10-53-208 (SEQ ID NO:760), DOM10-53-209 (SEQ ID NO:761), DOM10-53-210 (SEQ ID NO:762), DOM10-53-211 (SEQ ID NO:763), DOM10-53-213 (SEQ ID NO:764), DOM10-53-214 (SEQ ID NO:765), DOM10-53-215 (SEQ ID NO:766), DOM10-53-216 (SEQ ID NO:767), DOM10-53-217 (SEQ ID NO:768), DOM10-53-218 (SEQ ID NO:769), DOM10-53-219 (SEQ ID NO:770), DOM10-53-220 (SEQ ID NO:771), DOM10-53-221 (SEQ ID NO:772), DOM10-53-222 (SEQ ID NO:773), DOM10-53-223 (SEQ ID NO:774), DOM10-53-224 (SEQ ID NO:775), DOM10-53-225 (SEQ ID NO:776), DOM10-53-226 (SEQ ID NO:777), DOM10-53-227 (SEQ ID NO:778), DOM10-53-228 (SEQ ID NO:779), DOM10-53-229 (SEQ ID NO:780), DOM10-53-230 (SEQ ID NO:781), DOM10-53-231 (SEQ ID NO:782), DOM10-53-232 (SEQ ID NO:783), DOM10-53-233 (SEQ ID NO:784), DOM10-53-234 (SEQ ID NO:785), DOM10-53-235 (SEQ ID NO:786), DOM10-53-236 (SEQ ID NO:787), DOM10-53-237 (SEQ ID NO:788), DOM10-53-238 (SEQ ID NO:789), DOM10-53-239 (SEQ ID NO:790), DOM10-53-240 (SEQ ID NO:791), DOM10-53-241 (SEQ ID NO:792), DOM10-53-242 (SEQ ID NO:793), DOM10-53-243 (SEQ ID NO:794), DOM10-53-244 (SEQ ID NO:795), DOM10-53-245 (SEQ ID NO:796), DOM10-53-246 (SEQ ID NO:797), DOM10-53-247 (SEQ ID NO:798), DOM10-53-248 (SEQ ID NO:799), DOM10-53-249 (SEQ ID NO:800), DOM10-53-250 (SEQ ID NO:801), DOM10-53-251 (SEQ ID NO:802), DOM10-53-252 (SEQ ID NO:803), DOM10-53-253 (SEQ ID NO:804), DOM10-53-254 (SEQ ID NO:805), DOM10-53-255 (SEQ ID NO:806), DOM10-53-256 (SEQ ID NO:807), DOM10-53-257 (SEQ ID NO:808), DOM10-53-258 (SEQ ID NO:809), DOM10-53-259 (SEQ ID NO:810), DOM10-53-260 (SEQ ID NO:811), DOM10-53-261 (SEQ ID NO:812), DOM10-53-262 (SEQ ID NO:813), DOM10-53-263 (SEQ ID NO:814), DOM10-53-264 (SEQ ID NO:815), DOM10-53-265 (SEQ ID NO:816), DOM10-53-266 (SEQ ID NO:817), DOM10-53-267 (SEQ ID NO:818), DOM10-53-268 (SEQ ID NO:819), DOM10-53-269 (SEQ ID NO:820), DOM10-53-270 (SEQ ID NO:821), DOM10-53-271 (SEQ ID NO:822), DOM10-53-272 (SEQ ID NO:823), DOM10-53-273 (SEQ ID NO:824), DOM10-53-274 (SEQ ID NO:825), DOM10-53-275 (SEQ ID NO:826), DOM10-53-276 (SEQ ID NO:827), DOM10-53-277 (SEQ ID NO:828), DOM10-53-278 (SEQ ID NO:829), DOM10-53-279 (SEQ ID NO:830), DOM10-53-280 (SEQ ID NO:831), DOM10-53-281 (SEQ ID NO:832), DOM10-53-282 (SEQ ID NO:833), DOM10-53-283 (SEQ ID NO:834), DOM10-53-284 (SEQ ID NO:835), DOM10-53-285 (SEQ ID NO:836), DOM10-53-286 (SEQ ID NO:837), DOM10-53-287 (SEQ ID NO:838), DOM10-53-288 (SEQ ID NO:839), DOM10-53-289 (SEQ ID NO:840), DOM10-53-290 (SEQ ID NO:841), DOM10-53-291 (SEQ ID NO:842), DOM10-53-292 (SEQ ID NO:843), DOM10-53-293 (SEQ ID NO:844), DOM10-53-294 (SEQ ID NO:845), DOM10-53-295 (SEQ ID NO:846), DOM10-53-296 (SEQ ID NO:847), DOM10-53-297 (SEQ ID NO:848), DOM10-53-298 (SEQ ID NO:849), DOM10-53-299 (SEQ ID NO:850), DOM10-53-300 (SEQ ID NO:851), DOM10-53-301 (SEQ ID NO:852), DOM10-53-302 (SEQ ID NO:853), DOM10-53-303 (SEQ ID NO:854), DOM10-53-304 (SEQ ID NO:855), DOM10-53-305 (SEQ ID NO:856), DOM10-53-306 (SEQ ID NO:857), DOM10-53-307 (SEQ ID NO:858), DOM10-53-308 (SEQ ID NO:859), DOM10-53-309 (SEQ ID NO:860), DOM10-53-310 (SEQ ID NO:861), DOM10-53-311 (SEQ ID NO:862), DOM10-53-312 (SEQ ID NO:863), DOM10-53-314 (SEQ ID NO:864), DOM10-53-315 (SEQ ID NO:865), DOM10-53-316 (SEQ ID NO:866), DOM10-53-317 (SEQ ID NO:867), DOM10-53-318 (SEQ ID NO:868), DOM10-53-319 (SEQ ID NO:869), DOM10-53-320 (SEQ ID NO:870), DOM10-53-321 (SEQ ID NO:871), DOM10-53-322 (SEQ ID NO:872), DOM10-53-323 (SEQ ID NO:873), DOM10-53-324 (SEQ ID NO:874), DOM10-53-325 (SEQ ID NO:875), DOM10-53-326 (SEQ ID NO:876), DOM10-53-327 (SEQ ID NO:877), DOM10-53-328 (SEQ ID NO:878), DOM10-53-329 (SEQ ID NO:879), DOM10-53-330 (SEQ ID NO:880), DOM10-53-331 (SEQ ID NO:881), DOM10-53-333 (SEQ ID NO:882), DOM10-53-334 (SEQ ID NO:883), DOM10-53-336 (SEQ ID NO:884), DOM10-53-337 (SEQ ID NO:885), DOM10-53-338 (SEQ ID NO:886), DOM10-53-339 (SEQ ID NO:887), DOM10-53-340 (SEQ ID NO:888), DOM10-53-341 (SEQ ID NO:889), DOM10-53-342 (SEQ ID NO:890), DOM10-53-343 (SEQ ID NO:891), DOM10-53-344 (SEQ ID NO:892), DOM10-53-345 (SEQ ID NO:893), DOM10-53-346 (SEQ ID NO:894), DOM10-53-347 (SEQ ID NO:895), DOM10-53-348 (SEQ ID NO:896), DOM10-53-349 (SEQ ID NO:897), DOM10-53-350 (SEQ ID NO:898), DOM10-53-351 (SEQ ID NO:899), DOM10-53-352 (SEQ ID NO:900), DOM10-53-353 (SEQ ID NO:901), DOM10-53-354 (SEQ ID NO:902), DOM10-53-355 (SEQ ID NO:903), DOM10-53-356 (SEQ ID NO:904), DOM10-53-357 (SEQ ID NO:905), DOM10-53-358 (SEQ ID NO:906), DOM10-53-359 (SEQ ID NO:907), DOM10-53-360 (SEQ ID NO:908), DOM10-53-361 (SEQ ID NO:909), DOM10-53-362 (SEQ ID NO:910), DOM10-53-363 (SEQ ID NO:911), DOM10-53-364 (SEQ ID NO:912), DOM10-53-365 (SEQ ID NO:913), DOM10-53-366 (SEQ ID NO:914), DOM10-53-367 (SEQ ID NO:915), DOM10-53-368 (SEQ ID NO:916), DOM10-53-369 (SEQ ID NO:917), DOM10-53-370 (SEQ ID NO:918), DOM10-53-371 (SEQ ID NO:919), DOM10-53-372 (SEQ ID NO:920), DOM10-53-373 (SEQ ID NO:921), DOM10-53-374 (SEQ ID NO:922), DOM10-53-375 (SEQ ID NO:923), DOM10-53-376 (SEQ ID NO:924), DOM10-53-377 (SEQ ID NO:925), DOM10-53-378 (SEQ ID NO:926), DOM10-53-379 (SEQ ID NO:927), DOM10-53-380 (SEQ ID NO:928), DOM10-53-381 (SEQ ID NO:929), DOM10-53-382 (SEQ ID NO:930), DOM10-53-383 (SEQ ID NO:931), DOM10-53-384 (SEQ ID NO:932), DOM10-53-385 (SEQ ID NO:933), DOM10-53-386 (SEQ ID NO:934), DOM10-53-387 (SEQ ID NO:935), DOM10-53-388 (SEQ ID NO:936), DOM10-53-389 (SEQ ID NO:937), DOM10-53-390 (SEQ ID NO:938), DOM10-53-391 (SEQ ID NO:939), DOM10-53-392 (SEQ ID NO:940), DOM10-53-393 (SEQ ID NO:941), DOM10-53-394 (SEQ ID NO:942), DOM10-53-395 (SEQ ID NO:943), DOM10-53-396 (SEQ ID NO:944), DOM10-53-400 (SEQ ID NO:945), DOM10-53-401 (SEQ ID NO:946), DOM10-53-402 (SEQ ID NO:947), DOM10-53-403 (SEQ ID NO:948), DOM10-53-404 (SEQ ID NO:949), DOM10-53-405 (SEQ ID NO:950), DOM10-53-406 (SEQ ID NO:951), DOM10-53-407 (SEQ ID NO:952), DOM10-53-408 (SEQ ID NO:953), DOM10-53-409 (SEQ ID NO:954), DOM10-53-410 (SEQ ID NO:955), DOM10-53-411 (SEQ ID NO:956), DOM10-53-412 (SEQ ID NO:957), DOM10-53-413 (SEQ ID NO:958), DOM10-53-414 (SEQ ID NO:959), DOM10-53-415 (SEQ ID NO:960), DOM10-53-416 (SEQ ID NO:961), DOM10-53-417 (SEQ ID NO:962), DOM10-53-418 (SEQ ID NO:963), DOM10-53-419 (SEQ ID NO:964), DOM10-53-420 (SEQ ID NO:965), DOM10-53-421 (SEQ ID NO:966), DOM10-168 (SEQ ID NO:1283), DOM10-169 (SEQ ID NO:1284), DOM10-176 (SEQ ID NO:1285), DOM10-176-1 (SEQ ID NO:1286), DOM10-176-2 (SEQ ID NO:1287), DOM10-176-3 (SEQ ID NO:1288), DOM10-176-4 (SEQ ID NO:1289), DOM10-176-5 (SEQ ID NO:1290), DOM10-176-6 (SEQ ID NO:1291), DOM10-176-23 (SEQ ID NO:1292), DOM10-176-24 (SEQ ID NO:1293), DOM10-176-25 (SEQ ID NO:1294), DOM10-176-26 (SEQ ID NO:1295), DOM10-176-27 (SEQ ID NO:1296), DOM10-176-28 (SEQ ID NO:1297), DOM10-176-29 (SEQ ID NO:1298), DOM10-176-30 (SEQ ID NO:1299), DOM10-176-31 (SEQ ID NO:1300), DOM10-176-32 (SEQ ID NO:1301), DOM10-176-33 (SEQ ID NO:1302), DOM10-176-34 (SEQ ID NO:1303), DOM10-176-35 (SEQ ID NO:1304), DOM10-176-36 (SEQ ID NO:1305), DOM10-176-37 (SEQ ID NO:1306), DOM10-176-38 (SEQ ID NO:1307), DOM10-176-39 (SEQ ID NO:1308), DOM10-176-40 (SEQ ID NO:1309), DOM10-176-101 (SEQ ID NO:1310), DOM10-176-102 (SEQ ID NO:1311), DOM10-176-103 (SEQ ID NO:1312), DOM10-176-104 (SEQ ID NO:1313), DOM10-176-105 (SEQ ID NO:1314), DOM10-176-106 (SEQ ID NO:1315), DOM10-176-107 (SEQ ID NO:1316), DOM10-176-108 (SEQ ID NO:1317), DOM10-176-109 (SEQ ID NO:1318), DOM10-176-110 (SEQ ID NO:1319), DOM10-176-111 (SEQ ID NO:1320), DOM10-176-112 (SEQ ID NO:1321), DOM10-176-113 (SEQ ID NO:1322), DOM10-176-114 (SEQ ID NO:1323), DOM10-176-115 (SEQ ID NO:1324), DOM10-176-116 (SEQ ID NO:1325), DOM10-176-117 (SEQ ID NO:1326), DOM10-176-500 (SEQ ID NO:1327), DOM10-176-501 (SEQ ID NO:1328), DOM10-176-502 (SEQ ID NO:1329), DOM10-176-503 (SEQ ID NO:1330), DOM10-176-504 (SEQ ID NO:1331), DOM10-176-505 (SEQ ID NO:1332), DOM10-176-506 (SEQ ID NO:1333), DOM10-176-507 (SEQ ID NO:1334), DOM10-176-508 (SEQ ID NO:1335), DOM10-176-509 (SEQ ID NO:1336), DOMO-176-510 (SEQ ID NO:1337), DOM10-176-511 (SEQ ID NO:1338), DOM10-176-512 (SEQ ID NO:1339), DOM10-176-513 (SEQ ID NO:1340), DOM10-176-514 (SEQ ID NO:1341), DOM10-176-515 (SEQ ID NO:1342), DOM10-176-516 (SEQ ID NO:1343), DOM10-176-517 (SEQ ID NO:1344), DOM10-176-518 (SEQ ID NO:1345), DOM10-176-519 (SEQ ID NO:1346), DOM10-176-520 (SEQ ID NO:1347), DOM10-176-521 (SEQ ID NO:1348), DOM10-176-522 (SEQ ID NO:1349), DOM10-176-523 (SEQ ID NO:1350), DOM10-176-524 (SEQ ID NO:1351), DOM10-176-525 (SEQ ID NO:1352), DOM10-176-526 (SEQ ID NO:1353), DOM10-176-527 (SEQ ID NO:1354), DOM10-176-528 (SEQ ID NO:1355), DOM10-176-529 (SEQ ID NO:1356), DOM10-176-530 (SEQ ID NO:1357), DOM10-176-531 (SEQ ID NO:1358), DOM10-176-532 (SEQ ID NO:1359), DOM10-176-533 (SEQ ID NO:1360), DOM10-176-534 (SEQ ID NO:1361), DOM10-176-535 (SEQ ID NO:1362), DOM10-176-536 (SEQ ID NO:1363), DOM10-176-537 (SEQ ID NO:1364), DOM10-176-538 (SEQ ID NO:1365), DOM10-176-539 (SEQ ID NO:1366), DOM10-176-540 (SEQ ID NO:1367), DOM10-176-541 (SEQ ID NO:1368), DOM10-176-542 (SEQ ID NO:1369), DOM10-176-543 (SEQ ID NO:1370), DOM10-176-544 (SEQ ID NO:1371), DOM10-176-545 (SEQ ID NO:1372), DOM10-176-546 (SEQ ID NO:1373), DOM10-176-547 (SEQ ID NO:1374), DOM10-176-548 (SEQ ID NO:1375), DOM10-176-549 (SEQ ID NO:1376), DOM10-176-550 (SEQ ID NO:1377), DOM10-176-551 (SEQ ID NO:1378), DOM10-176-552 (SEQ ID NO:1379), DOM10-176-553 (SEQ ID NO:1380), DOM10-176-554 (SEQ ID NO:1381), DOM10-176-555 (SEQ ID NO:1382), DOM10-176-556 (SEQ ID NO:1383), DOM10-176-557 (SEQ ID NO:1384), DOM10-176-558 (SEQ ID NO:1385), DOM10-176-559 (SEQ ID NO:1386), DOM10-176-560 (SEQ ID NO:1387), DOM10-176-561 (SEQ ID NO:1388), DOM10-176-562 (SEQ ID NO:1389), DOM10-176-563 (SEQ ID NO:1390), DOM10-176-564 (SEQ ID NO:1391), DOM10-176-565 (SEQ ID NO:1392), DOM10-176-566 (SEQ ID NO:1393), DOM10-176-567 (SEQ ID NO:1394), DOM10-176-568 (SEQ ID NO:1395), DOM10-176-569 (SEQ ID NO:1396), DOM10-176-570 (SEQ ID NO:1397), DOM10-176-571 (SEQ ID NO:1398), DOM10-176-572 (SEQ ID NO:1399), DOM10-176-573 (SEQ ID NO:1400), DOM10-176-574 (SEQ ID NO:1401), DOM10-176-575 (SEQ ID NO:1402), DOM10-176-576 (SEQ ID NO:1403), DOM10-176-577 (SEQ ID NO:1404), DOM10-176-578 (SEQ ID NO:1405), DOM10-176-579 (SEQ ID NO:1406), DOM10-176-580 (SEQ ID NO:1407), DOM10-176-581 (SEQ ID NO:1408), DOM10-176-582 (SEQ ID NO:1409), DOM10-176-583 (SEQ ID NO:1410), DOM10-176-584 (SEQ ID NO:1411), DOM10-176-585 (SEQ ID NO:1412), DOM10-176-586 (SEQ ID NO:1413), DOM10-176-587 (SEQ ID NO:1414), DOM10-176-588 (SEQ ID NO:1415), DOM10-176-589 (SEQ ID NO:1416), DOM10-176-590 (SEQ ID NO:1417), DOM10-176-591 (SEQ ID NO:1418), DOM10-176-592 (SEQ ID NO:1419), DOM10-176-593 (SEQ ID NO:1420), DOM10-176-594 (SEQ ID NO:1421), DOM10-176-595 (SEQ ID NO:1422), DOM10-176-596 (SEQ ID NO:1423), DOM10-176-597 (SEQ ID NO:1424), DOM10-176-598 (SEQ ID NO:1425), DOM10-176-599 (SEQ ID NO:1426), DOM10-176-600 (SEQ ID NO:1427), DOM10-176-601 (SEQ ID NO:1428), DOM10-176-602 (SEQ ID NO:1429), DOM10-176-603 (SEQ ID NO:1430), DOM10-176-604 (SEQ ID NO:1431), DOM10-176-605 (SEQ ID NO:1432), DOM10-176-606 (SEQ ID NO:1433), DOM10-176-607 (SEQ ID NO:1434), DOM10-176-608 (SEQ ID NO:1435), DOM10-176-609 (SEQ ID NO:1436), DOM10-176-610 (SEQ ID NO:1437), DOM10-176-611 (SEQ ID NO:1438), DOM10-176-612 (SEQ ID NO:1439), DOM10-176-613 (SEQ ID NO:1440), DOM10-176-614 (SEQ ID NO:1441), DOM10-176-615 (SEQ ID NO:1442), DOM10-176-616 (SEQ ID NO:1443), DOMO-176-617 (SEQ ID NO:1444), DOM10-176-618 (SEQ ID NO:1445), DOM10-176-619 (SEQ ID NO:1446), DOM10-176-620 (SEQ ID NO:1447), DOM10-176-621 (SEQ ID NO:1448), DOM10-176-622 (SEQ ID NO:1449), DOM10-176-623 (SEQ ID NO:1450), DOM10-176-624 (SEQ ID NO:1451), DOM10-176-625 (SEQ ID NO:1452), DOM10-176-626 (SEQ ID NO:1453), DOMO-176-627 (SEQ ID NO:1454), DOM10-176-628 (SEQ ID NO:1455), DOM10-176-629 (SEQ ID NO:1456), DOM10-176-630 (SEQ ID NO:1457), DOMO-176-631 (SEQ ID NO:1458), DOM10-176-632 (SEQ ID NO:1459), DOM10-176-633 (SEQ ID NO:1460), DOM10-176-634 (SEQ ID NO:1461), DOMO-176-635 (SEQ ID NO:1462), DOM10-176-636 (SEQ ID NO:1463), DOM10-176-637 (SEQ ID NO:1464), DOMO-176-638 (SEQ ID NO:1465), DOM10-176-639 (SEQ ID NO:1466), DOM10-176-640 (SEQ ID NO:1467), DOM10-176-641 (SEQ ID NO:1468), DOM10-176-643 (SEQ ID NO:1469), DOM10-176-644 (SEQ ID NO:1470), DOM10-176-645 (SEQ ID NO:1471), DOM10-176-646 (SEQ ID NO:1472), DOM10-176-647 (SEQ ID NO:1473), DOM10-176-648 (SEQ ID NO:1474), DOM10-176-649 (SEQ ID NO:1475), DOM10-176-650 (SEQ ID NO:1476), DOM10-176-651 (SEQ ID NO:1477), DOM10-176-652 (SEQ ID NO:1478), DOM10-176-653 (SEQ ID NO:1479), DOM10-176-654 (SEQ ID NO:1480), DOM10-176-655 (SEQ ID NO:1481), DOM10-176-656 (SEQ ID NO:1482), DOM10-176-657 (SEQ ID NO:1483), DOM10-176-658 (SEQ ID NO:1484), DOM10-176-659 (SEQ ID NO:1485), DOM10-176-660 (SEQ ID NO:1486), DOM10-176-661 (SEQ ID NO:1487), DOM10-176-662 (SEQ ID NO:1488), DOM10-176-663 (SEQ ID NO:1489), DOM10-176-664 (SEQ ID NO:1490), DOM10-176-665 (SEQ ID NO:1491), DOM10-176-666 (SEQ ID NO:1492), DOM10-176-667 (SEQ ID NO:1493), DOM10-176-668 (SEQ ID NO:1494), DOM10-176-669 (SEQ ID NO:1495), DOM10-176-670 (SEQ ID NO:1496), DOM10-176-671 (SEQ ID NO:1497), DOM10-176-672 (SEQ ID NO:1498), DOM10-176-673 (SEQ ID NO:1499), DOM10-176-674 (SEQ ID NO:1500), DOM10-176-675 (SEQ ID NO:1501), DOM10-253 (SEQ ID NO:1502), DOM10-255 (SEQ ID NO:1503), DOM10-272 (SEQ ID NO:1504), DOM10-307 (SEQ ID NO:1505), DOM10-319 (SEQ ID NO:1506) and DOM10-319-1 (SEQ ID NO:1507). Preferably, nucleotide sequence identity is determined over the whole length of the nucleotide sequence that encodes the selected anti-IL-13 dAb.

[0283] In other embodiments, the isolated and/or recombinant nucleic acid comprises a nucleotice sequence encoding a ligand that has binding specificity for IL-13, as described herein, wherein said nucleotide sequence has at least about 70%, at least about 75%, at least about 80%, at least about 85%, at least about 90%, at least about 91%, at least about 92%, at least about 93%, at least about 94%, at least about 95%, at least about 96%, at least about 97%, at least about 98%, or at least about 99% nucleotide sequence identity with a nucleotide sequence encoding an anti-IL-13 dAb selected from the group consisting of DOM10-236 (SEQ ID NO:1804), DOM10-238 (SEQ ID NO:1805), DOM10-241 (SEQ ID NO:1806), DOM10-245 (SEQ ID NO:1807), DOM10-249 (SEQ ID NO:1808), DOM10-250 (SEQ ID NO:1809), DOM10-251 (SEQ ID NO:1810), DOM10-254 (SEQ ID NO:1811), DOM10-256 (SEQ ID NO:1812), DOM10-259 (SEQ ID NO:1813), DOM10-260 (SEQ ID NO:1814), DOM10-261 (SEQ ID NO:1815), DOM10-263 (SEQ ID NO:1816), DOM10-264 (SEQ ID NO:1817), DOM10-273 (SEQ ID NO:1818), DOM10-278 (SEQ ID NO:1819), DOM10-279 (SEQ ID NO:1820), DOM10-281 (SEQ ID NO:1821), DOM10-282 (SEQ ID NO:1822), DOM10-283 (SEQ ID NO:1823), DOM10-400 (SEQ ID NO:1824), DOM10-401 (SEQ ID NO:1825), DOM10-402 (SEQ ID NO:1826), DOM10-404 (SEQ ID NO:1827), DOM10-406 (SEQ ID NO:1828), DOM10-407 (SEQ ID NO:1829), DOM10-409 (SEQ ID NO:1830), DOM10-410 (SEQ ID NO:1831), DOM10-414 (SEQ ID NO:1832), DOM10-415 (SEQ ID NO:1833), DOM10-416 (SEQ ID NO:1834), DOM10-418 (SEQ ID NO:1835), DOM10-420 (SEQ ID NO:1836), DOM10-422 (SEQ ID NO:1837), DOM10-423 (SEQ ID NO:1838), DOM10-424 (SEQ ID NO:1839), DOM10-425 (SEQ ID NO:1840), DOM10-426 (SEQ ID NO:1841), DOM10-427 (SEQ ID NO:1842), DOM10-428 (SEQ ID NO:1843), DOM10-429 (SEQ ID NO:1844), DOM10-430 (SEQ ID NO:1845), DOM10-431 (SEQ ID NO:1846), DOM10-432 (SEQ ID NO:1847), DOM10-433 (SEQ ID NO:1848), DOM10-467 (SEQ ID NO:1849), DOM10-468 (SEQ ID NO:1850), DOM10-469 (SEQ ID NO:1851), DOM10-470 (SEQ ID NO:1852), DOM10-234 (SEQ ID NO:1853), DOM10-235 (SEQ ID NO:1854), DOM10-237 (SEQ ID NO:1855), DOM10-239 (SEQ ID NO:1856), DOM10-240 (SEQ ID NO:1857), DOM10-242 (SEQ ID NO:1858), DOM10-243 (SEQ ID NO:1859), DOM10-244 (SEQ ID NO:1860), DOM10-246 (SEQ ID NO:1861), DOM10-247 (SEQ ID NO:1862), DOM10-248 (SEQ ID NO:1863), DOM10-252 (SEQ ID NO:1864), DOM10-257 (SEQ ID NO:1865), DOM10-258 (SEQ ID NO:1866), DOM10-262 (SEQ ID NO:1867), DOM10-265 (SEQ ID NO:1868), DOM10-266 (SEQ ID NO:1869), DOM10-274 (SEQ ID NO:1870), DOM10-275 (SEQ ID NO:1871), DOM10-276 (SEQ ID NO:1872), DOM10-277 (SEQ ID NO:1873), DOM10-280 (SEQ ID NO:1874), DOM10-403 (SEQ ID NO:1875), DOM10-405 (SEQ ID NO:1876), DOM10-408 (SEQ ID NO:1877), DOM10-411 (SEQ ID NO:1878), DOM10-412 (SEQ ID NO:1879), DOM10-413 (SEQ ID NO:1880), DOM10-417 (SEQ ID NO:1881), DOM10-419 (SEQ ID NO:1882), DOM10-472 (SEQ ID NO:1883), DOM10-203 (SEQ ID NO:1884), DOM10-205 (SEQ ID NO:1885), DOM10-208 (SEQ ID NO:1886), DOM10-218 (SEQ ID NO:1887), DOM10-219 (SEQ ID NO:1888), DOM10-220 (SEQ ID NO:1889), DOM10-225 (SEQ ID NO:1890), DOM10-228 (SEQ ID NO:1891), DOM10-229 (SEQ ID NO:1892), DOM10-230 (SEQ ID NO:1893), DOM10-231 (SEQ ID NO:1894), DOM10-268 (SEQ ID NO:1895), DOM10-201 (SEQ ID NO:1896), DOM10-202 (SEQ ID NO:1897), DOM10-204 (SEQ ID NO:1898), DOM10-206 (SEQ ID NO:1899), DOM10-207 (SEQ ID NO:1900), DOM10-209 (SEQ ID NO:1901), DOM10-210 (SEQ ID NO:1902), DOM10-211 (SEQ ID NO:1903), DOM10-213 (SEQ ID NO:1904), DOM10-214 (SEQ ID NO:1905), DOM10-215 (SEQ ID NO:1906), DOM10-216 (SEQ ID NO:1907), DOM10-217 (SEQ ID NO:1908), DOM10-221 (SEQ ID NO:1909), DOM10-223 (SEQ ID NO:1910), DOM10-224 (SEQ ID NO:1911), DOM10-227 (SEQ ID NO:1912), DOM10-232 (SEQ ID NO:1913), DOM10-267 (SEQ ID NO:1914), DOM10-270 (SEQ ID NO:1915), DOM10-275-1 (SEQ ID NO:1918), DOM10-276-2 (SEQ ID NO:1919), DOM10-276-3 (SEQ ID NO:1920), DOM10-275-3 (SEQ ID NO:1979), DOM10-277-2 (SEQ ID NO:1980), DOM10-277-3 (SEQ ID NO:1981), DOM10-273-1 (SEQ ID NO:1982), DOM10-273-2 (SEQ ID NO:1983), DOM10-275-2 (SEQ ID NO:1984), DOM10-275-4 (SEQ ID NO:1985), DOM10-276-1 (SEQ ID NO:1986), DOM10-276-4 (SEQ ID NO:1987), DOM10-277-1 (SEQ ID NO:1988), DOM10-275-13 (SEQ ID NO:1989), DOM10-275-15 (SEQ ID NO:1990), DOM10-275-20 (SEQ ID NO:1991), DOM10-275-8 (SEQ ID NO:1992), DOM10-276-13 (SEQ ID NO:1993), DOM10-276-14 (SEQ ID NO:1994), DOM10-276-15 (SEQ ID NO:1995), DOM10-276-17 (SEQ ID NO:1996), DOM10-276-7 (SEQ ID NO:1997), DOM10-276-8 (SEQ ID NO:1998), DOM10-275-11 (SEQ ID NO:1999), DOM10-275-12 (SEQ ID NO:2000), DOM10-275-14 (SEQ ID NO:2001), DOM10-275-16 (SEQ ID NO:2002), DOM10-275-17 (SEQ ID NO:2003), DOM10-275-5 (SEQ ID NO:2004), DOM10-275-6 (SEQ ID NO:2005), DOM10-275-7 (SEQ ID NO:2006), DOM10-275-9 (SEQ ID NO:2007), DOM10-276-10 (SEQ ID NO:2008), DOM10-276-11 (SEQ ID NO:2009), DOM10-276-12 (SEQ ID NO:2010), DOM10-276-16 (SEQ ID NO:2011), DOM10-276-5 (SEQ ID NO:2012), DOM10-276-6 (SEQ ID NO:2013), DOM10-276-9 (SEQ ID NO:2014), DOM10-212 (SEQ ID NO:2016), DOM10-53-424 (SEQ ID NO:2017), DOM10-53-425 (SEQ ID NO:2018), DOM10-53-426 (SEQ ID NO:2019), DOM10-53-422 (SEQ ID NO:2020), DOM10-53-423 (SEQ ID NO:2021), DOM10-53-613 (SEQ ID NO:2022), DOM10-53-517 (SEQ ID NO:2023), DOM10-53-519 (SEQ ID NO:2024), DOM10-53-520 (SEQ ID NO:2025), DOM10-53-521 (SEQ ID NO:2026), DOM10-53-522 (SEQ ID NO:2027), DOM10-53-526 (SEQ ID NO:2028), DOM10-53-527 (SEQ ID NO:2029), DOM10-53-528 (SEQ ID NO:2030), DOM10-53-518 (SEQ ID NO:2031), DOM10-53-523 (SEQ ID NO:2032), DOM10-53-524 (SEQ ID NO:2033), DOM10-53-525 (SEQ ID NO:2034), DOM10-53-601 (SEQ ID NO:2035), DOM10-53-602 (SEQ ID NO:2036), DOM10-53-605 (SEQ ID NO:2037), DOM10-53-606 (SEQ ID NO:2038), DOM10-53-607 (SEQ ID NO:2039), DOM10-53-608 (SEQ ID NO:2040), DOM10-53-609 (SEQ ID NO:2041), DOM10-53-610 (SEQ ID NO:2042), DOM10-53-611 (SEQ ID NO:2043), DOM10-53-612 (SEQ ID NO:2044), DOM10-53-603 (SEQ ID NO:2045), DOM10-53-604 (SEQ ID NO:2046), DOM10-53-429 (SEQ ID NO:2047), DOM10-53-432 (SEQ ID NO:2048), DOM10-53-433 (SEQ ID NO:2049), DOM10-53-435 (SEQ ID NO:2050), DOM10-53-430 (SEQ ID NO:2051), DOM10-53-431 (SEQ ID NO:2052), DOM10-53-434 (SEQ ID NO:2053), DOM10-53-436 (SEQ ID NO:2054), DOM10-53-437 (SEQ ID NO:2055), DOM10-53-438 (SEQ ID NO:2056), DOM10-53-440 (SEQ ID NO:2057), DOM10-53-439 (SEQ ID NO:2058), DOM10-53-441 (SEQ ID NO:2059), DOM10-53-442 (SEQ ID NO:2060), DOM10-53-443 (SEQ ID NO:2061), DOM10-53-444 (SEQ ID NO:2062), DOM10-53-445 (SEQ ID NO:2063), DOM10-53-446 (SEQ ID NO:2064), DOM10-53-447 (SEQ ID NO:2065), DOM10-53-449 (SEQ ID NO:2066), DOM10-53-448 (SEQ ID NO:2067), DOM10-53-450 (SEQ ID NO:2068), DOM10-53-451 (SEQ ID NO:2069), DOM10-53-452 (SEQ ID NO:2070), DOM10-53-453 (SEQ ID NO:2071), DOM10-53-454 (SEQ ID NO:2072), DOM10-53-455 (SEQ ID NO:2073), DOM10-53-456 (SEQ ID NO:2074), DOM10-53-457 (SEQ ID NO:2075), DOM10-53-458 (SEQ ID NO:2076), DOM10-53-459 (SEQ ID NO:2077), DOM10-53-461 (SEQ ID NO:2078), DOM10-53-462 (SEQ ID NO:2079), DOM10-53-465 (SEQ ID NO:2080), DOM10-53-466 (SEQ ID NO:2081), DOM10-53-467 (SEQ ID NO:2082), DOM10-53-468 (SEQ ID NO:2083), DOM10-53-460 (SEQ ID NO:2084), DOM10-53-463 (SEQ ID NO:2085), DOM10-53-464 (SEQ ID NO:2086), DOM10-53-469 (SEQ ID NO:2087), DOM10-53-471 (SEQ ID NO:2088), DOM10-53-470 (SEQ ID NO:2089), DOM10-53-533 (SEQ ID NO:2090), DOM10-53-534 (SEQ ID NO:2091), DOM10-53-535 (SEQ ID NO:2092), DOM10-53-537 (SEQ ID NO:2093), DOM10-53-538 (SEQ ID NO:2094), DOM10-53-539 (SEQ ID NO:2095), DOM10-53-540 (SEQ ID NO:2096), DOM10-53-531 (SEQ ID NO:2097), DOM10-53-532 (SEQ ID NO:2098), DOM10-53-536 (SEQ ID NO:2099), DOM10-53-542 (SEQ ID NO:2100), DOM10-53-541 (SEQ ID NO:2101), DOM10-53-473 (SEQ ID NO:2102), DOM10-53-472 (SEQ ID NO:2103), DOM10-53-475 (SEQ ID NO:2104), DOM10-53-474 (SEQ ID NO:2105), DOM10-53-543 (SEQ ID NO:2106), DOM10-53-544 (SEQ ID NO:107), DOM10-53-545 (SEQ ID NO:2108), DOM10-53-548 (SEQ ID NO:2109), DOM10-53-546 (SEQ ID NO:2110), DOM10-53-549 (SEQ ID NO:2111), DOM10-53-547 (SEQ ID NO:2112), DOM10-53-550 (SEQ ID NO:2113), DOM10-53-551 (SEQ ID NO:2114), DOM10-53-560 (SEQ ID NO:2115), DOM10-53-565 (SEQ ID NO:2116), DOM10-53-559 (SEQ ID NO:2117), DOM10-53-561 (SEQ ID NO:2118), DOM10-53-562 (SEQ ID NO:2119), DOM10-53-563 (SEQ ID NO:2120), DOM10-53-564 (SEQ ID NO:2121), DOM10-53-566 (SEQ ID NO:2122), DOM10-53-554 (SEQ ID NO:2123), DOM10-53-552 (SEQ ID NO:2124), DOM10-53-553 (SEQ ID NO:2125), DOM10-53-558 (SEQ ID NO:2126), DOM10-53-556 (SEQ ID NO:2127) and DOM10-53-557 (SEQ ID NO:2128).

[0284] In other embodiments, the isolated and/or recombinant nucleic acid comprises a nucleotice sequence encoding a ligand that has binding specificity for IL-13, as described herein, wherein said nucleotide sequence has at least about 70%, at least about 75%, at least about 80%, at least about 85%, at least about 90%, at least about 91%, at least about 92%, at least about 93%, at least about 94%, at least about 95%, at least about 96%, at least about 97%, at least about 98%, or at least about 99% nucleotide sequence identity with a nucleotide sequence encoding an anti-IL-13 dAb selected from the group consisting of DOM10-53-474 (SEQ ID NO:2105), DOM10-275-78 (SEQ ID NO:2464), DOM10-275-94 (SEQ ID NO:2465), DOM10-275-99 (SEQ ID NO:2466), DOM10-275-100 (SEQ ID NO:2467) and DOM10-275-101 (SEQ ID NO:2468).

[0285] In other embodiments, the isolated and/or recombinant nucleic acid comprises a nucleotice sequence encoding a ligand that has binding specificity for IL-13, as described herein, wherein said nucleotide sequence has at least about 70%, at least about 75%, at least about 80%, at least about 85%, at least about 90%, at least about 91%, at least about 92%, at least about 93%, at least about 94%, at least about 95%, at least about 96%, at least about 97%, at least about 98%, or at least about 99% nucleotide sequence identity with a nucleotide sequence encoding an anti-IL-13 dAb selected from the group consisting of DOM10-275-78 (SEQ ID NO:2464), DOM10-275-94 (SEQ ID NO:2465), DOM10-275-99 (SEQ ID NO:2466), DOM10-275-100 (SEQ ID NO:2467) and DOM10-275-101 (SEQ ID NO:2468).

[0286] In some embodiments, the nucleotide sequence may be a codon-optimized version of the nucleotide sequence encoding a ligand that has binding specificity for IL-4 or IL-13, as described herein. Codon optimization of sequences is known in the art. In one embodiment, the nucleotide sequence is optimized for expression in a bacterial (e.g., E. coli or Pseudomonas sp., e.g., P. fluorescens), mammalian (e.g., CHO) or yeast host cell (e.g., Picchia or Saccharomyces, e.g., P. pastoris or S. cerevisiae).

[0287] As described above, embodiments of the invention provide codon optimized nucleotide sequences encoding polypeptides and variable domains of the invention. Codon optimized sequences of about 70% identity can be produced that encode for the same variable domain (e.g., DOM10-275-78 (SEQ ID NO:2464), DOM10-275-94 (SEQ ID NO:2465), DOM10-275-99 (SEQ ID NO:2466), DOM10-275-100 (SEQ ID NO:2467) and DOM10-275-101 (SEQ ID NO:2468)).

[0288] The invention also provides a vector comprising a recombinant nucleic acid molecule of the invention. In certain embodiments, the vector is an expression vector comprising one or more expression control elements or sequences that are operably linked to the recombinant nucleic acid of the invention The invention also provides a recombinant host cell comprising a recombinant nucleic acid molecule or vector of the invention. Suitable vectors (e.g., plasmids, phagmids), expression control elements, host cells and methods for producing recombinant host cells of the invention are well-known in the art, and examples are further described herein.

[0289] Suitable expression vectors can contain a number of components, for example, an origin of replication, a selectable marker gene, one or more expression control elements, such as a transcription control element (e.g., promoter, enhancer, terminator) and/or one or more translation signals, a signal sequence or leader sequence, and the like. Expression control elements and a signal sequence, if present, can be provided by the vector or other source. For example, the transcriptional and/or translational control sequences of a cloned nucleic acid encoding an antibody chain can be used to direct expression.

[0290] A promoter can be provided for expression in a desired host cell. Promoters can be constitutive or inducible. For example, a promoter can be operably linked to a nucleic acid encoding an antibody, antibody chain or portion thereof, such that it directs transcription of the nucleic acid. A variety of suitable promoters for prokaryotic (e.g., lac, tac, T3, T7 promoters for E. coli) and eukaryotic (e.g., Simian Virus 40 early or late promoter, Rous sarcoma virus long terminal repeat promoter, cytomegalovirus promoter, adenovirus late promoter) hosts are available.

[0291] In addition, expression vectors typically comprise a selectable marker for selection of host cells carrying the vector, and, in the case of a replicable expression vector, an origin of replication. Genes encoding products which confer antibiotic or drug resistance are common selectable markers and may be used in prokaryotic (e.g. lactamase gene (ampicillin resistance), Tet gene for tetracycline resistance) and eukaryotic cells (e.g., neomycin (G418 or geneticin), gpt (mycophenolic acid), ampicillin, or hygromycin resistance genes). Dihydrofolate reductase marker genes permit selection with methotrexate in a variety of hosts. Genes encoding the gene product of auxotrophic markers of the host (e.g., LEU2, URA3, HIS3) are often used as selectable markers in yeast. Use of viral (e.g., baculovirus) or phage vectors, and vectors which are capable of integrating into the genome of the host cell, such as retroviral vectors, are also contemplated. Suitable expression vectors for expression in mammalian cells and prokaryotic cells (E. coli), insect cells (Drosophila Schnieder S2 cells, Sf9) and yeast (P. methanolica, P. pastoris, S. cerevisiae) are well-known in the art.

[0292] Suitable host cells can be prokaryotic, including bacterial cells such as E. coli, B. subtilis and/or other suitable bacteria; eukaryotic cells, such as fungal or yeast cells (e.g., Pichia pastoris, Aspergillus sp., Saccharomyces cerevisiae, Schizosaccharomyces pombe, Neurospora crassa), or other lower eukaryotic cells, and cells of higher eukaryotes such as those from insects (e.g., Drosophila Schnieder S2 cells, Sf9 insect cells (WO 94/26087 (O'Connor)), mammals (e.g., COS cells, such as COS-1 (ATCC Accession No. CRL-1650) and COS-7 (ATCC Accession No. CRL-1651), CHO (e.g., ATCC Accession No. CRL-9096, CHO DG44 (Urlaub, G. and Chasin, L A., Proc. Natl. Acac. Sci. USA, 77(7):4216-4220 (1980))), 293 (ATCC Accession No. CRL-1573), HeLa (ATCC Accession No. CCL-2), CV1 (ATCC Accession No. CCL-70), WOP (Dailey, L., et al., J. Virol., 54:739-749 (1985), 3T3, 293T (Pear, W. S., et al., Proc. Natl. Acad. Sci. U.S.A., 90:8392-8396 (1993)) NS0 cells, SP2/0, HuT 78 cells and the like, or plants (e.g., tobacco). (See, for example, Ausubel, F. M. et al., eds. Current Protocols in Molecular Biology, Greene Publishing Associates and John Wiley & Sons Inc. (1993).) In some embodiments, the host cell is an isolated host cell and is not part of a multicellular organism (e.g., plant or animal). In preferred embodiments, the host cell is a non-human host cell.

[0293] The invention also provides a method for producing a ligand (e.g., dual-specific ligand, multispecific ligand) of the invention, comprising maintaining a recombinant host cell comprising a recombinant nucleic acid of the invention under conditions suitable for expression of the recombinant nucleic acid, whereby the recombinant nucleic acid is expressed and a ligand is produced. In some embodiments, the method further comprises isolating the ligand.

### Preparation of Immunoglobulin Based Ligands

[0294] Ligands (e.g., dual specific ligands, multispecific) according to the invention can be prepared according to previously established techniques, used in the field of antibody engineering, for the preparation of scFv, “phage” antibodies and other engineered antibody molecules. Techniques for the preparation of antibodies are for example described in the following reviews and the references cited therein: Winter & Milstein, (1991) Nature 349:293-299; Pluckthun (1992) Immunological Reviews 130:151-188; Wright et al., (1992) Crit. Rev. Immunol. 12:125-168; Holliger, P. & Winter, G. (1993) Curr. Op. Biotechn. 4, 446-449; Carter, et al. (1995) J. Hematother. 4, 463-470; Chester, K. A. & Hawkins, R. E. (1995) Trends Biotechn. 13, 294-300; Hoogenboom, H. R. (1997) Nature Biotechnol. 15, 125-126; Fearon, D. (1997) Nature Biotechnol. 15, 618-619; Plückthun, A. & Pack, P. (1997) Immunotechnology 3, 83-105; Carter, P. & Merchant, A. M. (1997) Curr. Opin. Biotechnol. 8, 449-454; Holliger, P. & Winter, G. (1997) Cancer Immunol. Immunother. 45, 128-130.

[0295] Suitable techniques employed for selection of antibody variable domains with a desired specificity employ libraries and selection procedures which are known in the art. Natural libraries (Marks et al. (1991) J. Mol. Biol., 222: 581; Vaughan et al. (1996) Nature Biotech., 14: 309) which use rearranged V genes harvested from human B cells are well known to those skilled in the art. Synthetic libraries (Hoogenboom & Winter (1992) J. Mol. Biol., 227: 381; Barbas et al. (1992) Proc. Natl. Acad. Sci. USA, 89: 4457; Nissim et al. (1994) EMBO J., 13: 692; Griffiths et al. (1994) EMBO J., 13: 3245; De Kruif et al. (1995) J. Mol. Biol., 248: 97) are prepared by cloning immunoglobulin V genes, usually using PCR. Errors in the PCR process can lead to a high degree of randomisation. V_{H} and/or V_{L} libraries may be selected against target antigens or epitopes separately, in which case single domain binding is directly selected for, or together.

### Library Vector Systems

[0296] A variety of selection systems are known in the art which are suitable for use in the present invention. Examples of such systems are described below.

[0297] Bacteriophage lambda expression systems may be screened directly as bacteriophage plaques or as colonies of lysogens, both as previously described (Huse et al. (1989) Science, 246: 1275; Caton and Koprowski (1990) Proc. Natl. Acad. Sci. U.S.A., 87; Mullinax et al. (1990) Proc. Natl. Acad. Sci. U.S.A., 87: 8095; Persson et al. (1991) Proc. Natl. Acad. Sci. U.S.A., 88: 2432) and are of use in the invention. Whilst such expression systems can be used to screen up to 10⁶ different members of a library, they are not really suited to screening of larger numbers (greater than 10⁶ members). Of particular use in the construction of libraries are selection display systems, which enable a nucleic acid to be linked to the polypeptide it expresses. As used herein, a selection display system is a system that permits the selection, by suitable display means, of the individual members of the library by binding the generic and/or target.

[0298] Selection protocols for isolating desired members of large libraries are known in the art, as typified by phage display techniques. Such systems, in which diverse peptide sequences are displayed on the surface of filamentous bacteriophage (Scott and Smith (1990) Science, 249: 386), have proven useful for creating libraries of antibody fragments (and the nucleotide sequences encoding them) for the in vitro selection and amplification of specific antibody fragments that bind a target antigen (McCafferty et al., WO 92/01047). The nucleotide sequences encoding the variable regions are linked to gene fragments which encode leader signals that direct them to the periplasmic space of E. coli and as a result the resultant antibody fragments are displayed on the surface of the bacteriophage, typically as fusions to bacteriophage coat proteins (e.g., pIII or pVIII). Alternatively, antibody fragments are displayed externally on lambda phage capsids (phagebodies). An advantage of phage-based display systems is that, because they are biological systems, selected library members can be amplified simply by growing the phage containing the selected library member in bacterial cells. Furthermore, since the nucleotide sequence that encodes the polypeptide library member is contained on a phage or phagemid vector, sequencing, expression and subsequent genetic manipulation is relatively straightforward.

[0299] Methods for the construction of bacteriophage antibody display libraries and lambda phage expression libraries are well known in the art (McCafferty et al. (1990) Nature, 348: 552; Kang et al. (1991) Proc. Natl. Acad. Sci. USA., 88: 4363; Clackson et al. (1991) Nature, 352: 624; Lowman et al. (1991) Biochemistry, 30: 10832; Burton et al. (1991) Proc. Natl. Acad. Sci. USA., 88: 10134; Hoogenboom et al. (1991) Nucleic Acids Res., 19: 4133; Chang et al. (1991) J. Immunol., 147: 3610; Breitling et al. (1991) Gene, 104: 147; Marks et al. (1991) supra; Barbas et al. (1992) supra; Hawkins and Winter (1992) J. Immunol., 22: 867; Marks et al., 1992, J. Biol. Chem., 267:16007; Lerner et al. (1992) Science, 258:1313, incorporated herein by reference).

[0300] One particularly advantageous approach has been the use of scFv phage-libraries (Huston et al., 1988, Proc. Natl. Acad. Sci. U.S.A., 85: 5879-5883; Chaudhary et al. (1990) Proc. Natl. Acad. Sci. U.S.A., 87:1066-1070; McCafferty et al. (1990) supra; Clackson et al. (1991) Nature, 352: 624; Marks et al. (1991) J. Mol. Biol., 222: 581; Chiswell et al. (1992) Trends Biotech., 10: 80; Marks et al. (1992) J. Biol. Chem., 267). Various embodiments of scFv libraries displayed on bacteriophage coat proteins have been described. Refinements of phage display approaches are also known, for example as described in WO96/06213 and WO92/01047 (Medical Research Council et al.) and WO97/08320 (Morphosys), which are incorporated herein by reference.

[0301] Other systems for generating libraries of polypeptides involve the use of cell-free enzymatic machinery for the in vitro synthesis of the library members. In one method, RNA molecules are selected by alternate rounds of selection against a target and PCR amplification (Tuerk and Gold (1990) Science, 249: 505; Ellington and Szostak (1990) Nature, 346: 818). A similar technique may be used to identify DNA sequences which bind a predetermined human transcription factor (Thiesen and Bach (1990) Nucleic Acids Res., 18: 3203; Beaudry and Joyce (1992) Science, 257: 635; WO92/05258 and WO92/14843). In a similar way, in vitro translation can be used to synthesise polypeptides as a method for generating large libraries. These methods which generally comprise stabilised polysome complexes, are described further in WO88/08453, WO90/05785, WO90/07003, WO91/02076, WO91/05058, and WO92/02536. Alternative display systems which are not phage-based, such as those disclosed in WO95/22625 and WO95/11922 (Affymax) use the polysomes to display polypeptides for selection.

[0302] A still further category of techniques involves the selection of repertoires in artificial compartments, which allow the linkage of a gene with its gene product. For example, a selection system in which nucleic acids encoding desirable gene products may be selected in microcapsules formed by water-in-oil emulsions is described in WO99/02671, WO00/40712 and Tawfik & Griffiths (1998) Nature Biotechnol 16(7), 652-6. Genetic elements encoding a gene product having a desired activity are compartmentalised into microcapsules and then transcribed and/or translated to produce their respective gene products (RNA or protein) within the microcapsules. Genetic elements which produce gene product having desired activity are subsequently sorted. This approach selects gene products of interest by detecting the desired activity by a variety of means.

### Library Construction

[0303] Libraries intended for selection, may be constructed using techniques known in the art, for example as set forth above, or may be purchased from commercial sources. Libraries which are useful in the present invention are described, for example, in WO99/20749. Once a vector system is chosen and one or more nucleic acid sequences encoding polypeptides of interest are cloned into the library vector, one may generate diversity within the cloned molecules by undertaking mutagenesis prior to expression; alternatively, the encoded proteins may be expressed and selected, as described above, before mutagenesis and additional rounds of selection are performed. Mutagenesis of nucleic acid sequences encoding structurally optimized polypeptides is carried out by standard molecular methods. Of particular use is the polymerase chain reaction, or PCR, (Mullis and Faloona (1987) Methods Enzymol., 155: 335, herein incorporated by reference). PCR, which uses multiple cycles of DNA replication catalyzed by a thermostable, DNA-dependent DNA polymerase to amplify the target sequence of interest, is well known in the art. The construction of various antibody libraries has been discussed in Winter et al. (1994) Ann. Rev. Immunology 12, 433-55, and references cited therein.

[0304] PCR is performed using template DNA (at least 1 fg; more usefully, 1-1000 ng) and at least 25 pmol of oligonucleotide primers; it may be advantageous to use a larger amount of primer when the primer pool is heavily heterogeneous, as each sequence is represented by only a small fraction of the molecules of the pool, and amounts become limiting in the later amplification cycles. A typical reaction mixture includes: 2 μl of DNA, 25 pmol of oligonucleotide primer, 2.5 μl of 10×PCR buffer 1 (Perkin-Elmer, Foster City, Calif.), 0.4 μl of 1.25 μM dNTP, 0.15 μl (or 2.5 units) of Taq DNA polymerase (Perkin Elmer, Foster City, Calif.) and deionized water to a total volume of 25 μl. Mineral oil is overlaid and the PCR is performed using a programmable thermal cycler. The length and temperature of each step of a PCR cycle, as well as the number of cycles, is adjusted in accordance to the stringency requirements in effect. Annealing temperature and timing are determined both by the efficiency with which a primer is expected to anneal to a template and the degree of mismatch that is to be tolerated; obviously, when nucleic acid molecules are simultaneously amplified and mutagenised, mismatch is required, at least in the first round of synthesis. The ability to optimise the stringency of primer annealing conditions is well within the knowledge of one of moderate skill in the art. An annealing temperature of between 30° C. and 72° C. is used. Initial denaturation of the template molecules normally occurs at between 92° C. and 99° C. for 4 minutes, followed by 20-40 cycles consisting of denaturation (94-99° C. for 15 seconds to 1 minute), annealing (temperature determined as discussed above; 1-2 minutes), and extension (72° C. for 1-5 minutes, depending on the length of the amplified product). Final extension is generally for 4 minutes at 72° C., and may be followed by an indefinite (0-24 hour) step at 4° C.

### Combining Single Variable Domains

[0305] Domains useful in the invention, once selected, may be combined by a variety of methods known in the art, including covalent and non-covalent methods. Preferred methods include the use of polypeptide linkers, as described, for example, in connection with scFv molecules (Bird et al., (1988) Science 242:423-426). Discussion of suitable linkers is provided in Bird et al. Science 242, 423-426; Hudson et al, Journal Immunol Methods 231 (1999) 177-189; Hudson et al, Proc. Nat. Acad. Sci. U.S.A. 85, 5879-5883. Linkers are preferably flexible, allowing the two single domains to interact. One linker example is a (Gly₄ Ser)ₙ linker, where n=1 to 8, e.g., 2, 3, 4, 5 or 7. The linkers used in diabodies, which are less flexible, may also be employed (Holliger et al., (1993) Proc. Nat. Acad. Sci. U.S.A. 90:6444-6448). In one embodiment, the linker employed is not an immunoglobulin hinge region.

[0306] Variable domains may be combined using methods other than linkers. For example, the use of disulphide bridges, provided through naturally-occurring or engineered cysteine residues, may be exploited to stabilize V_{H}-V_{H}, V_{L}-V_{L} or V_{H}-V_{L} dimers (Reiter et al., (1994) Protein Eng. 7:697-704) or by remodelling the interface between the variable domains to improve the “fit” and thus the stability of interaction (Ridgeway et al., (1996) Protein Eng. 7:617-621; Zhu et al., (1997) Protein Science 6:781-788). Other techniques for joining or stabilizing variable domains of immunoglobulins, and in particular antibody V_{H} domains, may be employed as appropriate.

### Characterisation of Ligands

[0307] The binding of a dual-specific ligand to the cell or the binding of each binding domain to each specific target can be tested by methods which will be familiar to those skilled in the art and include ELISA. In a preferred embodiment of the invention, binding is tested using monoclonal phage ELISA. Phage ELISA may be performed according to any suitable procedure: an exemplary protocol is set forth below.

[0308] Populations of phage produced at each round of selection can be screened for binding by ELISA to the selected antigen or epitope, to identify “polyclonal” phage antibodies. Phage from single infected bacterial colonies from these populations can then be screened by ELISA to identify “monoclonal” phage antibodies. It is also desirable to screen soluble antibody fragments for binding to antigen or epitope, and this can also be undertaken by ELISA using reagents, for example, against a C- or N-terminal tag (see for example Winter et al. (1994) Ann. Rev. Immunology 12, 433-55 and references cited therein.

[0309] The diversity of the selected phage monoclonal antibodies may also be assessed by gel electrophoresis of PCR products (Marks et al. 1991, supra; Nissim et al. 1994 supra), probing (Tomlinson et al., 1992) J. Mol. Biol. 227, 776) or by sequencing of the vector DNA.

### Structure of Ligands

[0310] In the case that each variable domain is selected from V-gene repertoires selected for instance using phage display technology as herein described, then these variable domains comprise a universal framework region, such that is they may be recognized by a generic ligand as herein defined. The use of universal frameworks, generic ligands and the like is described in WO99/20749.

[0311] Where V-gene repertoires are used, variation in polypeptide sequence is preferably located within the structural loops of the variable domains. The polypeptide sequences of either variable domain may be altered by DNA shuffling or by mutation in order to enhance the interaction of each variable domain with its complementary pair. DNA shuffling is known in the art and taught, for example, by Stemmer, 1994, Nature 370: 389-391 and U.S. Pat. No. 6,297,053, both of which are incorporated herein by reference. Other methods of mutagenesis are well known to those of skill in the art.

[0312] In general, nucleic acid molecules and vector constructs required for selection, preparation and formatting dual-specific ligands may be constructed and manipulated as set forth in standard laboratory manuals, such as Sambrook et al. (1989) Molecular Cloning: A Laboratory Manual, Cold Spring Harbor, USA.

[0313] The manipulation of nucleic acids useful in the present invention is typically carried out in recombinant vectors. As used herein, vector refers to a discrete element that is used to introduce heterologous DNA into cells for the expression and/or replication thereof. Methods by which to select or construct and, subsequently, use such vectors are well known to one of ordinary skill in the art. Numerous vectors are publicly available, including bacterial plasmids, bacteriophage, artificial chromosomes and episomal vectors. Such vectors may be used for simple cloning and mutagenesis; alternatively a gene expression vector is employed. A vector of use according to the invention may be selected to accommodate a polypeptide coding sequence of a desired size, typically from 0.25 kilobase (kb) to 40 kb or more in length. A suitable host cell is transformed with the vector after in vitro cloning manipulations. Each vector contains various functional components, which generally include a cloning (or “polylinker”) site, an origin of replication and at least one selectable marker gene. If the given vector is an expression vector, it additionally possesses one or more of the following: an enhancer element, a promoter, transcription, termination and signal sequences, each positioned in the vicinity of the cloning site, such that they are operatively linked to the gene encoding a dual-specific ligand according to the invention.

[0314] Both cloning and expression vectors generally contain nucleic acid sequences that enable the vector to replicate in one or more selected host cells. Typically in cloning vectors, this sequence is one that enables the vector to replicate independently of the host chromosomal DNA and includes origins of replication or autonomously replicating sequences. Such sequences are well known for a variety of bacteria, yeast and viruses. The origin of replication from the plasmid pBR322 is suitable for most Gram-negative bacteria, the 2 micron plasmid origin is suitable for yeast, and various viral origins (e.g. SV 40, adenovirus) are useful for cloning vectors in mammalian cells. Generally, the origin of replication is not needed for mammalian expression vectors unless these are used in mammalian cells able to replicate high levels of DNA, such as COS cells.

[0315] Advantageously, a cloning or expression vector may contain a selection gene also referred to as selectable marker. This gene encodes a protein necessary for the survival or growth of transformed host cells grown in a selective culture medium. Host cells not transformed with the vector containing the selection gene will therefore not survive in the culture medium. Typical selection genes encode proteins that confer resistance to antibiotics and other toxins, (e.g. ampicillin, neomycin, methotrexate or tetracycline), complement auxotrophic deficiencies, or supply critical nutrients not available in the growth media.

[0316] Since the replication of vectors encoding a dual-specific ligand according to the present invention is most conveniently performed in E. coli, an E. coli-selectable marker, for example, the β-lactamase gene that confers resistance to the antibiotic ampicillin, is of use. These can be obtained from E. coli plasmids, such as pBR322 or a pUC plasmid such as pUC18 or pUC19.

[0317] Expression vectors usually contain a promoter that is recognised by the host organism and is operably linked to the coding sequence of interest. Such a promoter may be inducible or constitutive. The term “operably linked” refers to a juxtaposition wherein the components described are in a relationship permitting them to function in their intended manner. A control sequence “operably linked” to a coding sequence is ligated in such a way that expression of the coding sequence is achieved under conditions compatible with the control sequences.

[0318] Promoters suitable for use with prokaryotic hosts include, for example, the β-lactamase and lactose promoter systems, alkaline phosphatase, the tryptophan (trp) promoter system and hybrid promoters such as the fac promoter. Promoters for use in bacterial systems will also generally contain a Shine-Delgarno sequence operably linked to the coding sequence.

[0319] The preferred vectors are expression vectors that enable the expression of a nucleotide sequence corresponding to a polypeptide library member. Thus, selection with the first and/or second antigen or epitope can be performed by separate propagation and expression of a single clone expressing the polypeptide library member or by use of any selection display system. As described above, the preferred selection display system is bacteriophage display. Thus, phage or phagemid vectors may be used, (e.g., pIT1 or pIT2). Leader sequences useful in the invention include pelB, stII, ompA, phoA, bla and pelA. One example is phagemid vectors, which have an E. coli. origin of replication (for double stranded replication) and also a phage origin of replication (for production of single-stranded DNA). The manipulation and expression of such vectors is well known in the art (Hoogenboom and Winter (1992) supra; Nissim et al. (1994) supra). Briefly, the vector contains a β-lactamase gene to confer selectivity on the phagemid and a lac promoter upstream of an expression cassette that consists (N to C terminal) of a pelB leader sequence (which directs the expressed polypeptide to the periplasmic space), a multiple cloning site (for cloning the nucleotide version of the library member), optionally, one or more peptide tags (for detection), optionally, one or more TAG stop codon and the phage protein pIII. Thus, using various suppressor and non-suppressor strains of E. coli and with the addition of glucose, iso-propyl thio-β-D-galactoside (IPTG) or a helper phage, such as VCS M13, the vector is able to replicate as a plasmid with no expression, produce large quantities of the polypeptide library member only or produce phage, some of which contain at least one copy of the polypeptide-pIII fusion on their surface.

[0320] Construction of vectors encoding dual-specific ligands according to the invention employs conventional ligation techniques. Isolated vectors or DNA fragments are cleaved, tailored, and religated in the form desired to generate the required vector. If desired, analysis to confirm that the correct sequences are present in the constructed vector can be performed in a known fashion. Suitable methods for constructing expression vectors, preparing in vitro transcripts, introducing DNA into host cells, and performing analyses for assessing expression and function are known to those skilled in the art. The presence of a gene sequence in a sample is detected, or its amplification and/or expression quantified by conventional methods, such as Southern or Northern analysis, Western blotting, dot blotting of DNA, RNA or protein, in situ hybridisation, immunocytochemistry or sequence analysis of nucleic acid or protein molecules. Those skilled in the art will readily envisage how these methods may be modified, if desired.

### Skeletons

[0321] Skeletons may be based on immunoglobulin molecules or may be non-immunoglobulin in origin as set forth above. Each domain of a ligand (e.g, dual-specific ligand) may be a different skeleton. Preferred immunoglobulin skeletons as herein defined includes any one or more of those selected from the following: an immunoglobulin molecule comprising at least (i) the CL (kappa or lambda subclass) domain of an antibody; or (ii) the CH1 domain of an antibody heavy chain; an immunoglobulin molecule comprising the CH₁ and CH2 domains of an antibody heavy chain; an immunoglobulin molecule comprising the CH1, CH2 and CH3 domains of an antibody heavy chain; or any of the subset (ii) in conjunction with the CL (kappa or lambda subclass) domain of an antibody. A hinge region domain may also be included. For example, the ligand can comprise a heavy chain constant region of an immunoglobulin (e.g., IgG (e.g., IgG1, IgG2, IgG3, IgG4) IgM, IgA, IgD or IgE) or portion thereof (e.g., Fc portion) and/or a light chain constant region (e.g., C_{λ}, C_{κ}). For example, the ligand can comprise CH1 of IgG1 (e.g., human IgG1), CH1 and CH2 of IgG1 (e.g., human IgG1), CH1, CH2 and CH3 of IgG1 (e.g., human IgG1), CH2 and CH3 of IgG1 (e.g., human IgG1), or CH1 and CH3 of IgG1 (e.g., human IgG1). Such combinations of domains may, for example, mimic natural antibodies, such as IgG or IgM, or fragments thereof, such as Fv, scFv, Fab or F(ab′)₂ molecules. Those skilled in the art will be aware that this list is not intended to be exhaustive.

### Protein Scaffolds

[0322] Each binding domain can comprise a protein scaffold and one or more CDRs (e.g., of the dAbs disclosed herein) which are involved in the specific interaction of the domain with one or more epitopes. Advantageously, an epitope binding domain according to the present invention comprises three CDRs. Suitable protein scaffolds include any of those selected from the group consisting of the following: those based on immunoglobulin domains, those based on fibronectin, those based on affibodies, those based on CTLA4, those based on chaperones such as GroEL, those based on lipocallin and those based on the bacterial Fc receptors SpA and SpD. Those skilled in the art will appreciate that this list is not intended to be exhaustive. The binding domains can also comprise a protein scaffold that has a binding site that has binding specificity for a target (e.g., IL-4, IL-13), but does not contain one or more CDRs (e.g., of the dAbs disclosed herein). For example, the binding domain can be a protein scaffold that has a binding site that has binding specificity for a target selected from an affibody, an SpA domain, based on CTLA4, those based on chaperones such as GroEL, those based on lipocallin and those based on the bacterial Fc receptors SpA and SpD, an LDL receptor class A domain, an avimer (see, e.g., U.S. Patent Application Publication Nos. 2005/0053973, 2005/0089932, 2005/0164301).

### Scaffolds for Use in Constructing Ligands

### Selection of the Main-Chain Conformation

[0323] The members of the immunoglobulin superfamily all share a similar fold for their polypeptide chain. For example, although antibodies are highly diverse in terms of their primary sequence, comparison of sequences and crystallographic structures has revealed that, contrary to expectation, five of the six antigen binding loops of antibodies (H1, H2, L1, L2, L3) adopt a limited number of main-chain conformations, or canonical structures (Chothia and Lesk (1987) J. Mol. Biol., 196: 901; Chothia et al. (1989) Nature, 342: 877). Analysis of loop lengths and key residues has therefore enabled prediction of the main-chain conformations of H1, H2, L1, L2 and L3 found in the majority of human antibodies (Chothia et al. (1992) J. Mol. Biol., 227: 799; Tomlinson et al. (1995) EMBO J., 14: 4628; Williams et al. (1996) J. Mol. Biol., 264: 220). Although the H3 region is much more diverse in terms of sequence, length and structure (due to the use of D segments), it also forms a limited number of main-chain conformations for short loop lengths which depend on the length and the presence of particular residues, or types of residue, at key positions in the loop and the antibody framework (Martin et al. (1996) J. Mol. Biol., 263: 800; Shirai et al. (1996) FEBS Letters, 399: 1).

[0324] Libraries of ligands and/or binding domains can be designed in which certain loop lengths and key residues were chosen to ensure that the main-chain conformation of the members is known. Advantageously, these are real conformations of immunoglobulin superfamily molecules found in nature, to minimize the chances that they are non-functional, as discussed above. Germline V gene segments serve as one suitable basic framework for constructing antibody or T-cell receptor libraries; other sequences are also of use. Variations may occur at a low frequency, such that a small number of functional members may possess an altered main-chain conformation, which does not affect its function.

[0325] Canonical structure theory is also of use to assess the number of different main-chain conformations encoded by ligands, to predict the main-chain conformation based on dual-specific ligand sequences and to choose residues for diversification which do not affect the canonical structure. It is known that, in the human V_{κ} domain, the L1 loop can adopt one of four canonical structures, the L2 loop has a single canonical structure and that 90% of human V_{κ} domains adopt one of four or five canonical structures for the L3 loop (Tomlinson et al. (1995) supra); thus, in the V_{κ} domain alone, different canonical structures can combine to create a range of different main-chain conformations. Given that the V_{λ} domain encodes a different range of canonical structures for the L1, L2 and L3 loops and that V_{κ} and V_{λ} domains can pair with any V_{H} domain which can encode several canonical structures for the H1 and H2 loops, the number of canonical structure combinations observed for these five loops is very large. This implies that the generation of diversity in the main-chain conformation may be essential for the production of a wide range of binding specificities. However, by constructing an antibody library based on a single known main-chain conformation it has been found, contrary to expectation, that diversity in the main-chain conformation is not required to generate sufficient diversity to target substantially all antigens. Even more surprisingly, the single main-chain conformation need not be a consensus structure—a single naturally occurring conformation can be used as the basis for an entire library. Thus, in a preferred aspect, the ligands of the invention possess a single known main-chain conformation.

[0326] The single main-chain conformation that is chosen is preferably commonplace among molecules of the immunoglobulin superfamily type in question. A conformation is commonplace when a significant number of naturally occurring molecules are observed to adopt it. Accordingly, in a preferred aspect of the invention, the natural occurrence of the different main-chain conformations for each binding loop of an immunoglobulin domain are considered separately and then a naturally occurring variable domain is chosen which possesses the desired combination of main-chain conformations for the different loops. If none is available, the nearest equivalent may be chosen. It is preferable that the desired combination of main-chain conformations for the different loops is created by selecting germline gene segments which encode the desired main-chain conformations. It is more preferable that the selected germline gene segments are frequently expressed in nature, and most preferable that they are the most frequently expressed of all natural germline gene segments.

[0327] In designing ligands (e.g., ds-dAbs), or libraries thereof, the incidence of the different main-chain conformations for each of the six antigen binding loops may be considered separately. For H1, H2, L1, L2 and L3, a given conformation that is adopted by between 20% and 100% of the antigen binding loops of naturally occurring molecules is chosen. Typically, its observed incidence is above 35% (i.e. between 35% and 100%) and, ideally, above 50% or even above 65%. Since the vast majority of H3 loops do not have canonical structures, it is preferable to select a main-chain conformation which is commonplace among those loops which do display canonical structures. For each of the loops, the conformation which is observed most often in the natural repertoire is therefore selected. In human antibodies, the most popular canonical structures (CS) for each loop are as follows: H1-CS 1 (79% of the expressed repertoire), H2-CS 3 (46%), L1-CS 2 of V_{κ} (39%), L2-CS 1 (100%), L3-CS 1 of V_{κ} (36%) (calculation assumes a κ:λ ratio of 70:30, Hood et al. (1967) Cold Spring Harbor Symp. Quant. Biol., 48: 133). For H3 loops that have canonical structures, a CDR3 length (Kabat et al. (1991) Sequences of proteins of immunological interest, U.S. Department of Health and Human Services) of seven residues with a salt-bridge from residue 94 to residue 101 appears to be the most common. There are at least 16 human antibody sequences in the EMBL data library with the required H3 length and key residues to form this conformation and at least two crystallographic structures in the protein data bank which can be used as a basis for antibody modelling (2cgr and 1 tet). The most frequently expressed germline gene segments with this combination of canonical structures are the V_{H} segment 3-23 (DP-47), the J_{H} segment JH4b, the V_{κ} segment O2/O12 (DPK9) and the J_{κ} segment J_{κ}1. V_{H} segments DP45 and DP38 are also suitable. These segments can therefore be used in combination as a basis to construct a library with the desired single main-chain conformation.

[0328] Alternatively, instead of choosing the single main-chain conformation based on the natural occurrence of the different main-chain conformations for each of the binding loops in isolation, the natural occurrence of combinations of main-chain conformations is used as the basis for choosing the single main-chain conformation. In the case of antibodies, for example, the natural occurrence of canonical structure combinations for any two, three, four, five or for all six of the antigen binding loops can be determined. Here, it is preferable that the chosen conformation is commonplace in naturally occurring antibodies and most preferable that it observed most frequently in the natural repertoire. Thus, in human antibodies, for example, when natural combinations of the five antigen binding loops, H1, H2, L1, L2 and L3, are considered, the most frequent combination of canonical structures is determined and then combined with the most popular conformation for the H3 loop, as a basis for choosing the single main-chain conformation.

### Diversification of the Canonical Sequence

[0329] Having selected several known main-chain conformations or, preferably a single known main-chain conformation, dual-specific ligands (e.g., ds-dAbs) or libraries for use in the invention can be constructed by varying each binding site of the molecule in order to generate a repertoire with structural and/or functional diversity. This means that variants are generated such that they possess sufficient diversity in their structure and/or in their function so that they are capable of providing a range of activities.

[0330] The desired diversity is typically generated by varying the selected molecule at one or more positions. The positions to be changed can be chosen at random or are preferably selected. The variation can then be achieved either by randomisation, during which the resident amino acid is replaced by any amino acid or analogue thereof, natural or synthetic, producing a very large number of variants or by replacing the resident amino acid with one or more of a defined subset of amino acids, producing a more limited number of variants.

[0331] Various methods have been reported for introducing such diversity. Error-prone PCR (Hawkins et al. (1992) J. Mol. Biol., 226: 889), chemical mutagenesis (Deng et al. (1994) J. Biol. Chem., 269: 9533) or bacterial mutator strains (Low et al. (1996) J. Mol. Biol., 260: 359) can be used to introduce random mutations into the genes that encode the molecule. Methods for mutating selected positions are also well known in the art and include the use of mismatched oligonucleotides or degenerate oligonucleotides, with or without the use of PCR. For example, several synthetic antibody libraries have been created by targeting mutations to the antigen binding loops. The H3 region of a human tetanus toxoid-binding Fab has been randomised to create a range of new binding specificities (Barbas et al. (1992) Proc. Natl. Acad. Sci. USA, 89: 4457). Random or semi-random H3 and L3 regions have been appended to germline V gene segments to produce large libraries with unmutated framework regions (Hoogenboom & Winter (1992) J. Mol. Biol., 227: 381; Barbas et al. (1992) Proc. Natl. Acad. Sci. USA, 89: 4457; Nissim et al. (1994) EMBO J., 13: 692; Griffiths et al. (1994) EMBO J., 13: 3245; De Kruif et al. (1995) J. Mol. Biol., 248: 97). Such diversification has been extended to include some or all of the other antigen binding loops (Crameri et al. (1996) Nature Med., 2: 100; Riechmann et al. (1995) Bio/Technology, 13: 475; Morphosys, WO97/08320, supra).

[0332] Since loop randomization has the potential to create approximately more than 10¹⁵ structures for H3 alone and a similarly large number of variants for the other five loops, it is not feasible using current transformation technology or even by using cell free systems to produce a library representing all possible combinations. For example, in one of the largest libraries constructed to date, 6×10¹⁰ different antibodies, which is only a fraction of the potential diversity for a library of this design, were generated (Griffiths et al. (1994) supra).

[0333] Preferably, only the residues that are directly involved in creating or modifying the desired function of each domain of the dual-specific ligand molecule are diversified. For many molecules, the function of each domain will be to bind a target and therefore diversity should be concentrated in the target binding site, while avoiding changing residues which are crucial to the overall packing of the molecule or to maintaining the chosen main-chain conformation.

### Diversification of the Canonical Sequence as it Applies to Antibody Domains

[0334] In the case of antibody based ligands (e.g., ds-dAbs), the binding site for each target is most often the antigen binding site. Thus, preferably only those residues in the antigen binding site are varied. These residues are extremely diverse in the human antibody repertoire and are known to make contacts in high-resolution antibody/antigen complexes. For example, in L2 it is known that positions 50 and 53 are diverse in naturally occurring antibodies and are observed to make contact with the antigen. In contrast, the conventional approach would have been to diversify all the residues in the corresponding Complementarity Determining Region (CDR1) as defined by Kabat et al. (1991, supra), some seven residues compared to the two diversified in the library for use according to the invention. This represents a significant improvement in terms of the functional diversity required to create a range of antigen binding specificities.

[0335] In nature, antibody diversity is the result of two processes: somatic recombination of germline V, D and J gene segments to create a naive primary repertoire (so called germline and junctional diversity) and somatic hypermutation of the resulting rearranged V genes. Analysis of human antibody sequences has shown that diversity in the primary repertoire is focused at the centre of the antigen binding site whereas somatic hypermutation spreads diversity to regions at the periphery of the antigen binding site that are highly conserved in the primary repertoire (see Tomlinson et al. (1996) J. Mol. Biol., 256: 813). This complementarity has probably evolved as an efficient strategy for searching sequence space and, although apparently unique to antibodies, it can easily be applied to other polypeptide repertoires. The residues which are varied are a subset of those that form the binding site for the target. Different (including overlapping) subsets of residues in the target binding site are diversified at different stages during selection, if desired.

[0336] In the case of an antibody repertoire, an initial ‘naive’ repertoire can be created where some, but not all, of the residues in the antigen binding site are diversified. As used herein in this context, the term “naive” refers to antibody molecules that have no pre-determined target. These molecules resemble those which are encoded by the immunoglobulin genes of an individual who has not undergone immune diversification, as is the case with fetal and newborn individuals, whose immune systems have not yet been challenged by a wide variety of antigenic stimuli. This repertoire is then selected against a range of antigens or epitopes. If required, further diversity can then be introduced outside the region diversified in the initial repertoire. This matured repertoire can be selected for modified function, specificity or affinity.

[0337] Naive repertoires of binding domains for the construction of dual-specific ligands in which some or all of the residues in the antigen binding site are varied are known in the art. (See, WO 2004/058821, WO 2004/003019, and WO 03/002609). The “primary” library mimics the natural primary repertoire, with diversity restricted to residues at the center of the antigen binding site that are diverse in the germline V gene segments (germline diversity) or diversified during the recombination process (junctional diversity). Those residues which are diversified include, but are not limited to, H50, H52, H52a, H53, H55, H56, H58, H95, H96, H97, H98, L50, L53, L91, L92, L93, L94 and L96. In the “somatic” library, diversity is restricted to residues that are diversified during the recombination process (junctional diversity) or are highly somatically mutated. Those residues which are diversified include, but are not limited to: H31, H33, H35, H95, H96, H97, H98, L30, L31, L32, L34 and L96. All the residues listed above as suitable for diversification in these libraries are known to make contacts in one or more antibody-antigen complexes. Since in both libraries, not all of the residues in the antigen binding site are varied, additional diversity is incorporated during selection by varying the remaining residues, if it is desired to do so. It shall be apparent to one skilled in the art that any subset of any of these residues (or additional residues which comprise the antigen binding site) can be used for the initial and/or subsequent diversification of the antigen binding site.

[0338] In the construction of libraries for use in the invention, diversification of chosen positions is typically achieved at the nucleic acid level, by altering the coding sequence which specifies the sequence of the polypeptide such that a number of possible amino acids (all 20 or a subset thereof) can be incorporated at that position. Using the IUPAC nomenclature, the most versatile codon is NNK, which encodes all amino acids as well as the TAG stop codon. The NNK codon is preferably used in order to introduce the required diversity. Other codons which achieve the same ends are also of use, including the NNN codon, which leads to the production of the additional stop codons TGA and TAA.

[0339] A feature of side-chain diversity in the antigen binding site of human antibodies is a pronounced bias which favors certain amino acid residues. If the amino acid composition of the ten most diverse positions in each of the V_{H}, V_{κ} and V_{λ} regions are summed, more than 76% of the side-chain diversity comes from only seven different residues, these being, serine (24%), tyrosine (14%), asparagine (11%), glycine (9%), alanine (7%), aspartate (6%) and threonine (6%). This bias towards hydrophilic residues and small residues which can provide main-chain flexibility probably reflects the evolution of surfaces which are predisposed to binding a wide range of antigens or epitopes and may help to explain the required promiscuity of antibodies in the primary repertoire.

[0340] Since it is preferable to mimic this distribution of amino acids, the distribution of amino acids at the positions to be varied preferably mimics that seen in the antigen binding site of antibodies. Such bias in the substitution of amino acids that permits selection of certain polypeptides (not just antibody polypeptides) against a range of target antigens is easily applied to any polypeptide repertoire. There are various methods for biasing the amino acid distribution at the position to be varied (including the use of tri-nucleotide mutagenesis, see WO97/08320), of which the preferred method, due to ease of synthesis, is the use of conventional degenerate codons. By comparing the amino acid profile encoded by all combinations of degenerate codons (with single, double, triple and quadruple degeneracy in equal ratios at each position) with the natural amino acid used it is possible to calculate the most representative codon. The codons (AGT)(AGC)T, (AGT)(AGC)C and (AGT)(AGC)(CT)—that is, DVT, DVC and DVY, respectively using IUPAC nomenclature—are those closest to the desired amino acid profile: they encode 22% serine and 11% tyrosine, asparagine, glycine, alanine, aspartate, threonine and cysteine. Preferably, therefore, libraries are constructed using either the DVT, DVC or DVY codon at each of the diversified positions.

### Therapeutic and Diagnostic Compositions and Uses

[0341] The invention provides compositions comprising the ligands of the invention and a pharmaceutically acceptable carrier, diluent or excipient, and therapeutic and diagnostic methods that employ the ligands or compositions of the invention. The ligands according to the method of the present invention may be employed in in vivo therapeutic and prophylactic applications, in vivo diagnostic applications and the like.

[0342] Therapeutic and prophylactic uses of ligands of the invention involve the administration of ligands according to the invention to a recipient mammal, such as a human. The ligands bind to targets with high affinity and/or avidity. In some embodiments, such as IgG-like ligands, the ligands can allow recruitment of cytotoxic cells to mediate killing of cancer cells, for example by antibody dependent cellular cytoxicity.

[0343] Substantially pure ligands of at least 90 to 95% homogeneity are preferred for administration to a mammal, and 98 to 99% or more homogeneity is most preferred for pharmaceutical uses, especially when the mammal is a human. Once purified, partially or to homogeneity as desired, the ligands may be used diagnostically or therapeutically (including extracorporeally) or in developing and performing assay procedures, immunofluorescent stainings and the like (Lefkovite and Pernis, (1979 and 1981) Immunological Methods, Volumes I and II, Academic Press, NY).

[0344] In the instant application, the term “prevention” involves administration of the protective composition prior to the induction of the disease. “Suppression” refers to administration of the composition after an inductive event, but prior to the clinical appearance of the disease. “Treatment” involves administration of the protective composition after disease symptoms become manifest. Treatment includes ameliorating symptoms associated with the disease, and also preventing or delaying the onset of the disease and also lessening the severity or frequency of symptoms of the disease.

[0345] For example, the ligands, of the present invention will typically find use in preventing, suppressing or treating disease states. For example, ligands can be administered to treat, suppress or prevent a chronic inflammatory disease, allergic hypersensitivity, cancer, bacterial or viral infection, autoimmune disorders (which include, but are not limited to, Type I diabetes, asthma, multiple sclerosis, rheumatoid arthritis, juvenile rheumatoid arthritis, psoriatic arthritis, spondylarthropathy (e.g., ankylosing spondylitis), systemic lupus erythematosus, inflammatory bowel disease (e.g., Crohn's disease, ulcerative colitis), myasthenia gravis and Behcet's syndrome, psoriasis, endometriosis, and abdominal adhesions (e.g., post abdominal surgery).

[0346] The ligands of the invention may be used to treat, suppress or prevent disease, such as an allergic disease, a Th2-mediated disease, IL-13-mediated disease, IL-4-mediated disease, and/or IL-4/IL-13-mediated disease. Examples of such diseases include, Hodgkin's disease, asthma, allergic asthma, atopic dermatitis, atopic allergy, ulcerative colitis, scleroderma, allergic rhinitis, COPD, idiopathic pulmonary fibrosis, chronic graft rejection, bleomycin-induced pulmonary fibrosis, radiation-induced pulmonary fibrosis, pulmonary granuloma, progressive systemic sclerosis, schistosomiasis, hepatic fibrosis, renal cancer, Burkitt lymphoma, Hodgkins disease, non-Hodgkins disease, Sezary syndrome, asthma, septic arthritis, dermatitis herpetiformis, chronic idiopathic urticaria, ulcerative colitis, scleroderma, hypertrophic scarring, Whipple's Disease, benign prostate hyperplasia, a lung disorder in which IL-4 receptor plays a role, condition in which IL-4 receptor-mediated epithelial barrier disruption plays a role, a disorder of the digestive system in which IL-4 receptor plays a role, an allergic reaction to a medication, Kawasaki disease, sickle cell disease, Churg-Strauss syndrome, Grave's disease, pre-eclampsia, Sjogren's syndrome, autoimmune lymphoproliferative syndrome, autoimmune hemolytic anemia, Barrett's esophagus, autoimmune uveitis, tuberculosis, cystic fibrosis, allergic bronchopulmonary mycosis, chronic obstructive pulmonary disease, bleomycin-induced pneumopathy and fibrosis, pulmonary alveolar proteinosis, adult respiratory distress syndrome, sarcoidosis, hyper IgE syndrome, idiopathic hypereosinophil syndrome, an autoimmune blistering disease, pemphigus vulgaris, bullous pemphigoid, myasthenia gravis, chronic fatigue syndrome, nephrosis).

[0347] The term “allergic disease” refers to a pathological condition in which a patient is hypersensitized to and mounts an immunologic reaction against a substance that is normally nonimmunogenic. Allergic disease is generally characterized by activation of mast cells by IgE resulting in an inflammatory response (e.g., local response, systemic response) that can result in symptoms as benign as a runny nose, to life-threatening anaphylactic shock and death. Examples of allergic disease include, but are not limited to, allergic rhinitis (e.g., hay fever), asthma (e.g., allergic asthma), allergic dermatitis (e.g., eczema), contact dermatitis, food allergy and urticaria (hives).

[0348] As used herein “Th2-mediated disease” refers to a disease in which pathology is produced (in whole or in part) by an immune response (Th2-type immune response) that is regulated by CD4⁺ Th2 T lymphocytes, which characteristically produce IL-4, IL-5, IL-10 and IL-13. A Th2-type immune response is associated with the production of certain cytokines (e.g., IL-4, IL-13) and of certain classes of antibodies (e.g., IgE), and is associate with humor immunity. Th2-mediated diseases are characterized by the presence of elevated levels of Th2 cytokines (e.g., IL-4, IL-13) and/or certain classes of antibodies (e.g., IgE) and include, for example, allergic disease (e.g., allergic rhinitis, atopic dermatitis, asthma (e.g., atopic asthma), allergic airways disease (AAD), anaphylactic shock, conjunctivitis), autoimmune disorders associated with elevated levels of IL-4 and/or IL-13 (e.g., rheumatoid arthritis, host-versus-graft disease, renal disease (e.g., nephritic syndrome, lupus nephritis)), and infections associated with elevated levels of IL-4 and/or IL-13 (e.g., viral, parasitic, fungal (e.g., C. albicans) infection).

[0349] Certain cancers are associated with elevated levels of IL-4 and/or IL-13 or associated with IL-4-induced and/or IL-13-induced cancer cell proliferation (e.g., B cell lymphoma, T cell lymphoma, multiple myeloma, head and neck cancer, breast cancer and ovarian cancer). These cancers can be treated, suppressed or prevented using the ligand of the invention.

[0350] Generally, the present ligands will be utilized in purified form together with pharmacologically appropriate carriers. Typically, these carriers include aqueous or alcoholic/aqueous solutions, emulsions or suspensions, and include saline and/or buffered media. Parenteral vehicles include sodium chloride solution, Ringer's dextrose, dextrose and sodium chloride and lactated Ringer's. Suitable physiologically-acceptable adjuvants, if necessary to keep a polypeptide complex in suspension, may be chosen from thickeners such as carboxymethylcellulose, polyvinylpyrrolidone, gelatin and alginates.

[0351] Intravenous vehicles include fluid and nutrient replenishers and electrolyte replenishers, such as those based on Ringer's dextrose. Preservatives and other additives, such as antimicrobials, antioxidants, chelating agents and inert gases, may also be present (Mack (1982) Remington's Pharmaceutical Sciences, 16th Edition). A variety of suitable formulations can be used, including extended release formulations.

[0352] The ligand of the present invention may be used as separately administered compositions or in conjunction with other agents. The ligands can be used in combination therapy with existing IL-13 therapeutics (e.g., existing IL-13 agents (for example, anti-IL-13Rα1, IL-4/13 Trap, anti-IL-13) plus IL-4 dAb, and existing IL-4 agents (for example, anti-IL-4R, IL-4 Mutein, IL-4/13 Trap) plus IL-13 dAb) and IL-13 and IL-4 antibodies (for example, WO05/0076990 (CAT), WO03/092610 (Regeneron), WO00/64944 (Genetic Inst.) and WO2005/062967 (Tanox)). The ligands can be administered and or formulated together with one or more additional therapeutic or active agents. When a ligand is administered with an additional therapeutic agent, the ligand can be administered before, simultaneously with or subsequent to administration of the additional agent. Generally, the ligand and additional agent are administered in a manner that provides an overlap of therapeutic effect. Additional agents that can be administered or formulated with the ligand of the invention include, for example, various immunotherapeutic drugs, such as cylcosporine, methotrexate, adriamycin or cisplatinum, antibiotics, antimycotics, anti-viral agents and immunotoxins. For example, when the antagonist is administered to prevent, suppress or treat lung inflammation or a respiratory disease (e.g., asthma), it can be administered in conjunction with phosphodiesterase inhibitors (e.g., inhibitors of phosphodiesterase 4), bronchodilators (e.g., beta2-agonists, anticholinergerics, theophylline), short-acting beta-agonists (e.g., albuterol, salbutamol, bambuterol, fenoterol, isoetherine, isoproterenol, levalbuterol, metaproterenol, pirbuterol, terbutaline and tornlate), long-acting beta-agonists (e.g., formoterol and salmeterol), short acting anticholinergics (e.g., ipratropium bromide and oxitropium bromide), long-acting anticholinergics (e.g., tiotropium), theophylline (e.g. short acting formulation, long acting formulation), inhaled steroids (e.g., beclomethasone, beclometasone, budesonide, flunisolide, fluticasone propionate and triamcinolone), oral steroids (e.g., methylprednisolone, prednisolone, prednisolon and prednisone), combined short-acting beta-agonists with anticholinergics (e.g., albuterol/salbutamol/ipratopium, and fenoterol/ipratopium), combined long-acting beta-agonists with inhaled steroids (e.g., salmeterol/fluticasone, and formoterol/budesonide) and mucolytic agents (e.g., erdosteine, acetylcysteine, bromheksin, carbocysteine, guiafenesin and iodinated glycerol.

[0353] Other suitable co-therapeutic agents that can be administered with a ligand of the invention to prevent, suppress or treat asthma (e.g., allergic asthma), include a corticosteroid (e.g., beclomethasone, budesonide, fluticasone), cromoglycate, nedocromil, beta-agonist (e.g., salbutamol, terbutaline, bambuterol, fenoterol, reproterol, tolubuterol, salmeterol, fomtero), zafirlukast, salmeterol, prednisone, prednisolone, theophylline, zileutron, montelukast, and leukotriene modifiers.

[0354] The ligands of the invention can be coadministered with a variety of co-therapeutic agents suitable for treating diseases (e.g., a Th-2 mediated disease, IL-4-mediated disease, IL-13-mediated disease, IL-4 and IL-13-mediated disease, cancer), including cytokines, analgesics/antipyretics, antiemetics, and chemotherapeutics.

[0355] Cytokines include, without limitation, a lymphokine, tumor necrosis factors, tumor necrosis factor-like cytokine, lymphotoxin, interferon, macrophage inflammatory protein, granulocyte monocyte colony stimulating factor, interleukin (including, without limitation, interleukin-1, interleukin-2, interleukin-6, interleukin-12, interleukin-15, interleukin-18), growth factors, which include, without limitation, (e.g., growth hormone, insulin-like growth factor 1 and 2 (IGF-1 and IGF-2), granulocyte colony stimulating factor (GCSF), platelet derived growth factor (PGDF), epidermal growth factor (EGF), and agents for erythropoiesis stimulation, e.g., recombinant human erythropoietin (Epoetin alfa), EPO, a hormonal agonist, hormonal antagonists (e.g., flutamide, tamoxifen, leuprolide acetate (LUPRON)), and steroids (e.g., dexamethasone, retinoid, betamethasone, cortisol, cortisone, prednisone, dehydrotestosterone, glucocorticoid, mineralocorticoid, estrogen, testosterone, progestin).

[0356] Analgesics/antipyretics can include, without limitation, (e.g., aspirin, acetaminophen, ibuprofen, naproxen sodium, buprenorphine hydrochloride, propoxyphene hydrochloride, propoxyphene napsylate, meperidine hydrochloride, hydromorphone hydrochloride, morphine sulfate, oxycodone hydrochloride, codeine phosphate, dihydrocodeine bitartrate, pentazocine hydrochloride, hydrocodone bitartrate, levorphanol tartrate, diflunisal, trolamine salicylate, nalbuphine hydrochloride, mefenamic acid, butorphanol tartrate, choline salicylate, butalbital, phenyltoloxamine citrate, diphenhydramine citrate, methotrimeprazine, cinnamedrine hydrochloride, meprobamate, and the like).

[0357] Antiemetics can also be coadministered to prevent or treat nausea and vomiting, e,g., suitable antiemetics include meclizine hydrochloride, nabilone, prochlorperazine, dimenhydrinate, promethazine hydrochloride, thiethylperazine, scopolamine, and the like).

[0358] Chemotherapeutic agents, as that term is used herein, include, but are not limited to, for example antimicrotubule agents, (e.g., taxol (paclitaxel)), taxotere (docetaxel); alkylating agents (e.g., cyclophosphamide, carmustine, lomustine, and chlorambucil); cytotoxic antibiotics (e.g., dactinomycin, doxorubicin, mitomycin-C, and bleomycin; antimetabolites (e.g., cytarabine, gemcitatin, methotrexate, and 5-fluorouracil); antimiotics (e.g., vincristine vinca alkaloids (e.g., etoposide, vinblastine, and vincristine)); and others such as cisplatin, dacarbazine, procarbazine, and hydroxyurea; and combinations thereof.

[0359] Pharmaceutical compositions can include “cocktails” of various cytotoxic or other agents in conjunction with ligands of the present invention, or even combinations of ligands according to the present invention having different specificities, such as ligands selected using different target antigens or epitopes, whether or not they are pooled prior to administration.

[0360] The route of administration of pharmaceutical compositions according to the invention may be any suitable route, such as any of those commonly known to those of ordinary skill in the art. For therapy, including without limitation immunotherapy, the ligands of the invention can be administered to any patient in accordance with standard techniques. The administration can be by any appropriate mode, including parenterally, intravenously, intramuscularly, intraperitoneally, transdermally, intrathecally, intraarticularly, via the pulmonary route, or also, appropriately, by direct infusion (e.g., with a catheter). The dosage and frequency of administration will depend on the age, sex and condition of the patient, concurrent administration of other drugs, counterindications and other parameters to be taken into account by the clinician. Administration can be local (e.g., local delivery to the lung by pulmonary administration, (e.g., intranasal administration) or local injection directly into a tumor) or systemic as indicated.

[0361] The ligands of this invention can be lyophilised for storage and reconstituted in a suitable carrier prior to use. This technique has been shown to be effective with conventional immunoglobulins and art-known lyophilisation and reconstitution techniques can be employed. It will be appreciated by those skilled in the art that lyophilisation and reconstitution can lead to varying degrees of antibody activity loss (e.g. with conventional immunoglobulins, IgM antibodies tend to have greater activity loss than IgG antibodies) and that use levels may have to be adjusted upward to compensate.

[0362] The compositions containing the ligands can be administered for prophylactic and/or therapeutic treatments. In certain therapeutic applications, an adequate amount to accomplish at least partial inhibition, suppression, modulation, killing, or some other measurable parameter, of a population of selected cells is defined as a “therapeutically-effective dose”. Amounts needed to achieve this dosage will depend upon the severity of the disease and the general state of the patient's health, but generally range from 0.005 to 5.0 mg of ligand per kilogram of body weight, with doses of 0.05 to 2.0 mg/kg/dose being more commonly used. For prophylactic applications, compositions containing the present ligands or cocktails thereof may also be administered in similar or slightly lower dosages, to prevent, inhibit or delay onset of disease (e.g., to sustain remission or quiescence, or to prevent acute phase). The skilled clinician will be able to determine the appropriate dosing interval to treat, suppress or prevent disease. When a ligand is administered to treat, suppress or prevent a disease, it can be administered up to four times per day, twice weekly, once weekly, once every two weeks, once a month, or once every two months, at a dose of, for example, about 10 μg/kg to about 80 mg/kg, about 100 μg/kg to about 80 mg/kg, about 1 mg/kg to about 80 mg/kg, about 1 mg/kg to about 70 mg/kg, about 1 mg/kg to about 60 mg/kg, about 1 mg/kg to about 50 mg/kg, about 1 mg/kg to about 40 mg/kg, about 1 mg/kg to about 30 mg/kg, about 1 mg/kg to about 20 mg/kg, about 1 mg/kg to about 10 mg/kg, about 10 μg/kg to about 10 mg/kg, about 10 μg/kg to about 5 mg/kg, about 10 μg/kg to about 2.5 mg/kg, about 1 mg/kg, about 2 mg/kg, about 3 mg/kg, about 4 mg/kg, about 5 mg/kg, about 6 mg/kg, about 7 mg/kg, about 8 mg/kg, about 9 mg/kg or about 10 mg/kg. In particular embodiments, the ligand is administered to treat, suppress or prevent a chronic allergic disease once every two weeks or once a month at a dose of about 10 μg/kg to about 10 mg/kg (e.g., about 10 μg/kg, about 100 μg/kg, about 1 mg/kg, about 2 mg/kg, about 3 mg/kg, about 4 mg/kg, about 5 mg/kg, about 6 mg/kg, about 7 mg/kg, about 8 mg/kg, about 9 mg/kg or about 10 mg/kg.)

[0363] In particular embodiments, the ligand is administered to treat, suppress or prevent asthma each day, every two days, once a week, once every two weeks or once a month at a dose of about 10 μg/kg to about 10 mg/kg (e.g., about 10 μg/kg, about 100 μg/kg, about 1 mg/kg, about 2 mg/kg, about 3 mg/kg, about 4 mg/kg, about 5 mg/kg, about 6 mg/kg, about 7 mg/kg, about 8 mg/kg, about 9 mg/kg or about 10 mg/kg). The ligand can also be administered at a daily dose or unit dose (e.g., to treat, suppress or prevent asthma) at a daily dose or unit dose of about 10 mg, about 9 mg, about 8 mg, about 7 mg, about 6 mg, about 5 mg, about 4 mg, about 3 mg, about 2 mg or about 1 mg.

[0364] In particular embodiments, the ligand of the invention is administered at a dose that provides saturation of IL-4 and/or IL-13 or a desired serum concentration in vivo. The skilled physician can determine appropriate dosing to achieve saturation, for example by titrating ligand and monitoring the amount of free binding sites on IL-4 and/or IL-13 or the serum concentration of ligand. Therapeutic regiments that involve administering a therapeutic agent to achieve target saturation or a desired serum concentration of agent are common in the art.

[0365] Treatment or therapy performed using the compositions described herein is considered “effective” if one or more symptoms are reduced (e.g., by at least 10% or at least one point on a clinical assessment scale), relative to such symptoms present before treatment, or relative to such symptoms in an individual (human or animal model) not treated with such composition or other suitable control. Symptoms will obviously vary depending upon the disease or disorder targeted, but can be measured by an ordinarily skilled clinician or technician. Such symptoms can be measured, for example, by monitoring the level of one or more biochemical indicators of the disease or disorder (e.g., levels of an enzyme or metabolite correlated with the disease, affected cell numbers, etc.), by monitoring physical manifestations (e.g., inflammation, tumor size, etc.), or by an accepted clinical assessment scale, for example, Juniper's Asthma Quality of Life Questionnaire (American Thoracic Society's 32 item assessment evaluates the quality of life with respect to activity limitations, symptoms, emotional function and exposure to environmental stimuli; Juniper, et. al., “Health-related Quality of Life in Moderate Asthma,” Chest, 116:1297-1303 (1999).), the Expanded Disability Status Scale (for multiple sclerosis), the Irvine Inflammatory Bowel Disease Questionnaire (32 point assessment evaluates quality of life with respect to bowel function, systemic symptoms, social function and emotional status—score ranges from 32 to 224, with higher scores indicating a better quality of life), the Quality of Life Rheumatoid Arthritis Scale, or other accepted clinical assessment scale as known in the field. A sustained (e.g., one day or more, preferably longer) reduction in disease or disorder symptoms by at least 10% or by one or more points on a given clinical scale is indicative of “effective” treatment. Similarly, prophyl axis performed using a composition as described herein is “effective” if the onset or severity of one or more symptoms is delayed, reduced or abolished relative to such symptoms in a similar individual (human or animal model) not treated with the composition.

[0366] A composition containing ligands according to the present invention may be utilized in prophylactic and therapeutic settings to aid in the alteration, inactivation, killing or removal of a select target cell population in a mammal. In addition, the ligands and selected repertoires of polypeptides described herein may be used extracorporeally or in vitro selectively to kill, deplete or otherwise effectively remove a target cell population from a heterogeneous collection of cells. Blood from a mammal may be combined extracorporeally with the ligands, e.g. antibodies, cell-surface receptors or binding proteins thereof whereby the undesired cells are killed or otherwise removed from the blood for return to the mammal in accordance with standard techniques.

### EXAMPLES

### Example 1

### General Methods

[0367] For primary selections against human IL-13, libraries of V_{H} dAbs and Vk dAbs were panned against biotinylated human IL-13 protein (R&D systems, Minneapolis, US). The IL-13 was biotinylated using a five fold molar excess of EZ-Link Sulfo-NHS-LC-Biotin reagent (Pierce, Rockford, USA). Round 1 was performed with streptavidin-coated magnetic beads (Dynal, Norway) and either 1100 nM or 20 nM antigen; round 2 with neutravidin-coated beads and either 20 nM or 4 nM antigen (Henderikx et al., 2002, Selection of antibodies against biotinylated antigens. Antibody Phage Display: Methods and protocols, Ed. O'Brien and Atkin, Humana Press).

[0368] In the second primary selection, the same VH and Vk dAb phage display libraries were panned while maintaining the antigen concentration at 100 nM, in the final volume of 1 ml PBS, containing 2% Marvel. In the first and third rounds, 4 mg of M280 Streptavidin Dynabeads (Dynal, Norway) were used to capture antigen-phage complexes. In the second round, 4 mg of Neutravidin-coated M270 Carboxy Dynabeads (Dynal, Norway) were used instead.

[0369] M270 Carboxy Dynabeads (Dynal, Norway) were coated with Neutravidin by standard cabodiimined chemistry as follows. 1 ml of Carboxy M-270 Dynabeads (30 mg/ml, 2×10⁶ beads/μl) were washed twice with 1 ml 0.01M NaOH allowing four minutes capture between washes. Sodium hydroxide was removed by two washes with water, followed by activation of the carboxy groups with 1 ml of 40 mg/ml 1-Ethyl-3-[3-dimethylaminopropyl]carbodiimide hydrochloride (EDC) (Sigma, U.K) for 30 minutes at room temperature, with rotational mixing. EDC-activated beads were washed twice with water and 1 ml of 1 mg/ml Neutravidin (Pierce, U.S.A.) in 10 mM 2-Morpholinoethanesulfonic acid (MES, Sigma, U.K.) buffer pH5 was added to the activated beads. The coupling reaction was allowed to proceed with rotation for 30 minutes at room temperature. After coupling, the beads were captured, the unreacted Neutravidin was removed and the unreacted amine-reactive groups on the beads were quenched by incubation with 1 ml of 0.05 M tris(hydroxymethyl)aminomethane (Tris) buffer pH7.4 for fifteen minutes at room temperature. The coated and quenched beads were washed four times in PBS containing 0.1% BSA, resuspended in 1 ml of the same. Sodium azide (Sigma, U.K.) was added to 0.02% for preservation and the beads were stored at 4 C until required.

The selection process for VH and Vk dAb phage libraries is described in the following tables (Table 1 and 2)

TABLE 1

| | Round 1 | | | Round 2 | | | Round 3 | | |
|---|---|---|---|---|---|---|---|---|---|
| Library | Phage | Phage | Recovery | Phage | Phage | Recovery | Phage | Phage | Recovery |
| Ligand | In | out | % | In | out | % | In | out | % |
| Vk(G4 + G6) | 2.0E+12 | 2.0E+05 | 1.0E−05 | 1.0E+10 | 3.0E+04 | 3.0E−04 | 2.0E+10 | 6.2E+08 | 3.1 |
| with IL13 | | | | | | | | | |
| Vk(G4 + G6) | | | | | | | 2.0E+10 | 8.0E+06 | 0.04 |
| without IL13 | | | | | | | | | |

TABLE 2

| | Round 1 | | | Round 2 | | | Round 3 | | |
|---|---|---|---|---|---|---|---|---|---|
| Library | Phage | Phage | Recovery | Phage | Phage | Recovery | Phage | Phage | Recovery |
| Ligand | In | out | % | In | out | % | In | out | % |
| VH(G4 + G6) + L | 1.0E+12 | 3.0E+05 | 3.0E−05 | 1.0E+10 | 7.0E+04 | 7.0E−04 | 2.0E+10 | 8.0E+08 | 4 |
| VH(G4 + G6) − L | | | | | | | 2.0E+10 | 5.0E+06 | 0.025 |

The selected V_{H} (DOM10-236 (SEQ ID NO:1804), DOM10-238 (SEQ ID NO:1805), DOM10-241 (SEQ ID NO:1806), DOM10-245 (SEQ ID NO:1807), DOM10-249 (SEQ ID NO:1808), DOM10-250 (SEQ ID NO:1809), DOM10-251 (SEQ ID NO:1810), DOM10-254 (SEQ ID NO:1811), DOM10-256 (SEQ ID NO:1812), DOM10-259 (SEQ ID NO:1813), DOM10-260 (SEQ ID NO:1814), DOM10-261 (SEQ ID NO:1815), DOM10-263 (SEQ ID NO:1816), DOM10-264 (SEQ ID NO:1817), DOM10-273 (SEQ ID NO:1818), DOM10-278 (SEQ ID NO:1819), DOM10-279 (SEQ ID NO:1820), DOM10-281 (SEQ ID NO:1821), DOM10-282 (SEQ ID NO:1822), DOM10-283 (SEQ ID NO:1823), DOM10-400 (SEQ ID NO:1824), DOM10-401 (SEQ ID NO:1825), DOM10-402 (SEQ ID NO:1826), DOM10-404 (SEQ ID NO:1827), DOM10-406 (SEQ ID NO:1828), DOM10-407 (SEQ ID NO:1829), DOM10-409 (SEQ ID NO:1830), DOM10-410 (SEQ ID NO:1831), DOM10-414 (SEQ ID NO:1832), DOM10-415 (SEQ ID NO:1833), DOM10-416 (SEQ ID NO:1834), DOM10-418 (SEQ ID NO:1835), DOM10-420 (SEQ ID NO:1836), DOM10-422 (SEQ ID NO:1837), DOM10-423 (SEQ ID NO:1838), DOM10-424 (SEQ ID NO:1839), DOM10-425 (SEQ ID NO:1840), DOM10-426 (SEQ ID NO:1841), DOM10-427 (SEQ ID NO:1842), DOM10-428 (SEQ ID NO:1843), DOM10-429 (SEQ ID NO:1844), DOM10-430 (SEQ ID NO:1845), DOM10-431 (SEQ ID NO:1846), DOM10-432 (SEQ ID NO:1847), DOM10-433 (SEQ ID NO:1848), DOM10-467 (SEQ ID NO:1849), DOM10-468 (SEQ ID NO:1850), DOM10-469 (SEQ ID NO:1851), DOM10-470 (SEQ ID NO:1852), DOM10-234 (SEQ ID NO:1853), DOM10-235 (SEQ ID NO:1854), DOM10-237 (SEQ ID NO:1855), DOM10-239 (SEQ ID NO:1856), DOM10-240 (SEQ ID NO:1857), DOM10-242 (SEQ ID NO:1858), DOM10-243 (SEQ ID NO:1859), DOM10-244 (SEQ ID NO:1860), DOM10-246 (SEQ ID NO:1861), DOM10-247 (SEQ ID NO:1862), DOM10-248 (SEQ ID NO:1863), DOM10-252 (SEQ ID NO:1864), DOM10-257 (SEQ ID NO:1865), DOM10-258 (SEQ ID NO:1866), DOM10-262 (SEQ ID NO:1867), DOM10-265 (SEQ ID NO:1868), DOM10-266 (SEQ ID NO:1869), DOM10-274 (SEQ ID NO:1870), DOM10-275 (SEQ ID NO:1871), DOM10-276 (SEQ ID NO:1872), DOM10-277 (SEQ ID NO:1873), DOM10-280 (SEQ ID NO:1874), DOM10-403 (SEQ ID NO:1875), DOM10-405 (SEQ ID NO:1876), DOM10-408 (SEQ ID NO:1877), DOM10-411 (SEQ ID NO:1878), DOM10-412 (SEQ ID NO:1879), DOM10-413 (SEQ ID NO:1880), DOM10-417 (SEQ ID NO:1881), DOM10-419 (SEQ ID NO:1882), DOM10-472 (SEQ ID NO:1883)) and Vk (DOM10-203 (SEQ ID NO:1884), DOM10-205 (SEQ ID NO:1885), DOM10-208 (SEQ ID NO:1886), DOM10-218 (SEQ ID NO:1887), DOM10-219 (SEQ ID NO:1888), DOM10-220 (SEQ ID NO:1889), DOM10-225 (SEQ ID NO:1890), DOM10-228 (SEQ ID NO:1891), DOM10-229 (SEQ ID NO:1892), DOM10-230 (SEQ ID NO:1893), DOM10-231 (SEQ ID NO:1894), DOM10-268 (SEQ ID NO:1895), DOM10-201 (SEQ ID NO:1896), DOM10-202 (SEQ ID NO:1897), DOM10-204 (SEQ ID NO:1898), DOM10-206 (SEQ ID NO:1899), DOM10-207 (SEQ ID NO:1900), DOM10-209 (SEQ ID NO:1901), DOM10-210 (SEQ ID NO:1902), DOM10-211 (SEQ ID NO:1903), DOM10-213 (SEQ ID NO:1904), DOM10-214 (SEQ ID NO:1905), DOM10-215 (SEQ ID NO:1906), DOM10-216 (SEQ ID NO:1907), DOM10-217 (SEQ ID NO:1908), DOM10-221 (SEQ ID NO:1909), DOM10-223 (SEQ ID NO:1910), DOM10-224 (SEQ ID NO:1911), DOM10-227 (SEQ ID NO:1912), DOM10-232 (SEQ ID NO:1913), DOM10-53-425 (SEQ ID NO:2018)) domain antibodies were cloned into pDOM5 expression vector for screening by ELISA or BIAcore off-rate analysis.

[0370] For primary selections against human IL-4, libraries of V_{H} dAbs and libraries of Vk dAbs were panned against biotinylated human IL-4 protein (Peprotech, Rocky Hill, USA). The IL-4 was biotinylated as described above. Round 1 was performed with neutravidin-coated magnetic beads (Dynal, Norway) and 100 nM antigen; round 2 with streptavidin-coated beads and 20 nM antigen. Neutravidin-coated beads were prepared by incubating tosylactivated Dyna beads (Dynal, Norway) in 5 mg/ml Immunopure neutravidin biotin-binding protein/0.1 M borate buffer pH9.5 for 16 hours at 37° C., followed by incubation in 0.1% (w/v) BSA/PBS for 5 minutes at 4° C., followed by incubation in 0.1% (w/v) BSA/0.2 M Tris pH 8.5 for 16 hours at 4° C. Elution at each stage was with 1 mg/ml trypsin-PBS.

[0371] For affinity maturation selections, the above method was used but with the following modifications: two to four rounds of selection were performed using streptavidin-coated beads and decreasing concentrations of antigen (in the range of 1 nM to 50 pM). Phage vector from selection outputs (rounds 2 and 3) was isolated by plasmid prep (Qiagen) and dAb insert released by restriction digest with Sal I and Not I. This insert was ligated into Sal I/Not I cut pDOM5 and used to transform E. coli strain HB2151 for soluble expression and screening of dAbs.

[0372] pDOM5 is a pUC119-based expression vector under control of the LacZ promoter. Expression of dAbs into the supernatant was ensured by fusion to the universal GAS leader signal peptide at the N-terminal end. In addition, a myc-tag was appended at the C-terminal end of the dAbs. After transformation of E. coli HB2151 cells, colonies were used to inoculate 50 to 500 mL of Terrific Broth medium supplemented with carbenicillin (100 μg per mL). Induction was performed with the OVERNIGHT EXPRESS™ SYSTEM 1 (high-level protein expression system, Novagen) according to the manufacturer's instructions. The cultures were incubated at 30° C. for 24-48 hours with shaking at 250 rpm. After cell pelleting by centrifugation (4,000 rpm for 20 min), the supernatants were filtered using a 0.45 μm filter and incubated overnight at 4° C. with Streamline-protein A beads (Amersham Biosciences, binding capacity: 5 mg of dAb per mL of beads) for the V_{H} dAbs, or Protein L-sepharose beads (Affitech, binding capacity: 2 mg of dAb per mL of beads) for the V_{L} dAbs. The beads were then packed into drip columns, washed with 10 column volumes of PBS, and bound dAbs were eluted in 0.1 M glycine-HCl, pH 2.0 or 3.0 for the V_{H} and V_{L} dAbs, respectively. After neutralisation with 1 M Tris-HCl, pH 8.0, the protein samples were dialyzed in PBS and concentrated on Vivaspin 5-kDa concentrators (Vivascience) before storage at 4° C. Protein purity was estimated by visual analysis after SDS-PAGE on 12% acrylamide Tris-glycine gel (Invitrogen). Protein concentrations and yields (in mg per L of bacterial culture) were measured at 280 nm, using extinction coefficients calculated from the amino acid compositions.

[0373] Affinity Maturation Using Phage Libraries

Maturation was performed using error prone mutagenesis, site-directed mutagenesis of multiple residues and single residue screening technologies. For error-prone maturation libraries, plasmid DNA encoding the dAb to be matured was amplified by PCR, using the GENEMORPH® II RANDOM MUTAGENESIS KIT (random, unique mutagenesis kit, Stratagene). The product was digested with Sal I and Not I and used in a ligation reaction with cut phage vector pDOM4. For the site-directed mutagenesis and single residue libraries, PCR reactions were performed using degenerate oligonucleotides containing NNK or NNS codons to diversify the required positions in the dAb to be affinity matured. Assembly PCR was then used to generate a full length diversified insert. The insert was digested with Sal I and Not I and used in a ligation reaction with pDOM4 for mutagenesis of multiple residues and pDOM5 for mutagenesis of single residues. The ligation produced by either method was then used to transform E. coli strain TB1 by electroporation and the transformed cells plated on 2×TY agar containing 15 μg/ml tetracycline, yielding library sizes of >1×10⁷ clones.

[0374] pDOM4, is a derivative of the Fd phage vector in which the gene III signal peptide sequence is replaced with the yeast glycolipid anchored surface protein (GAS) signal peptide. It also contains a c-myc tag between the leader sequence and gene III, which puts the gene III back in frame. This leader sequence functions well both in phage display vectors but also in other prokaryotic expression vectors and can be universally used.

### Affinity Maturation Using Emulsification

### Library Construction.

[0375] One pg of template DNA of either DOM10-176 (SEQ ID NO:1285), DOM9-155 (SEQ ID NO:451), or DOM9-44 (SEQ ID NO:358) Vk dAb was PCR amplified using GENEMORPH II for 35 cycles with the primer set OA16 (ATACCATGGGGTCGACGGACATCCAG; SEQ ID NO:1797) and OA17n (TTCTTTTGCGGCCGCCCGTTTGATTTCCACC; SEQ ID NO:1798), followed by a restriction digest with SalI and NotI. The clean DOM10-176 (SEQ ID NO:1285), DOM9-155 (SEQ ID NO:451), and DOM9-44 (SEQ ID NO:358) fragments were ligated in either of the vectors pIE2aA or pIE7t3T using T4 DNA ligase in 20 μl volume. All vectors are derived from the pIVEX2.2b Nde vector from Roche. 0.5 μl aliquots of the ligation product were amplified in the presence of competitor DNA or real-time PCR on BioRad Mini-Opticon thermal cycler to establish that the number of ligation events exceeded 10⁹ per reaction. The libraries were PCR amplified from the ligation reaction using either SuperTaq and primers AS11 (TTCGCTATTACGCCAGCTGG; SEQ ID NO:1799) and AS17 (CAGTCAGGCACCGTGTATG; SEQ ID NO:1800) (scArc libraries) or Platinum pfx and primers AS12 (AAAGGGGGATGTGCTGCAAG; SEQ ID NO:1801) and AS18 (AACAATGCGCTCATCGTCATC; SEQ ID NO:1802) (Tus libraries). For targeted diversification libraries, oligonucleotides containing NNS codons at the indicated positions were used and the dAb was assembled by overlap PCR. The assembly reaction was PCR amplified with OA16/17n oligonucleotides using PfuUltra DNA polymerase and cloned SalI/NotI in the scArc or Tus in vitro translation (IVT) vectors.

[0376] Ten pg of template DNA of either DOM10-416 (SEQ ID NO:1834), DOM10-273 (SEQ ID NO:1818), DOM10-275 (SEQ ID NO:1871) or DOM10-276 (1872) V_{H} dAb was PCR amplified using GenemorphII for 35 cycles with the primer set AS9 (SEQ ID NO:1916) and AS65 (SEQ ID NO:1917), followed by a restriction digest with SalI and NotI. The clean DOM10-416 (SEQ ID NO:1834), DOM10-273 (DOM10-273), DOM10-275 (SEQ ID NO:1871) or DOM10-276 (SEQ ID NO:1872) fragments were ligated into pIE2a 2A vector (SEQ ID:2015), a derivative of pIE2aA with two Arc operators per gene and potentially tetravalent display capability, using T4 DNA ligase in 20 μl volume. 0.5 μl aliquots of the ligation product were amplified using real-time PCR on BioRad Mini-Opticon thermal cycler to establish that the number of ligation events exceeded 10⁹ per reaction.

### In Vitro Expression and Emulsification.

[0377] The following reaction mixture was used for in vitro transcription/translation of the library of PCR fragments: 1.5 μl 100 mM oxidized glutathione, 2 μl 5 mM Methionine, 0.5 μl DNA (5.0×10⁸ molecules), 10 μl H₂O, 0.25 μl of 50 mg/ml anti-HA mAb 3F10 (used only with scArc), biotinylated antigen at varying concentrations, and 35 μl of EcoPro T7 coupled transcription-translation extract. Immediately after mixing, the extract was added to 0.7 ml of light white mineral oil containing 4.5% (v/v) Span-80 and 0.5% (v/v) Triton X-100. Emulsification was carried out by spinning a magnetic stirrer for 5 min at 2000 rpm in a 5 ml glass vial. Microscopic analysis of droplet formation confirmed that droplets were ˜2 μm in diameter. The emulsion was incubated for 60 (Tus) to 180 (scArc) min at 25° C. to allow expression and formation of the protein-DNA complex to take place. Breaking of the emulsion was performed by adding 0.25 ml of PBS/1% BSA/biotinylated antigen and 0.5 ml hexane/20% (v/v) mineral oil, followed by brief vortexing and centrifugation for 1 min at 13,000 rpm. After removal of the oil phase, 1 ml of hexane/mineral oil was added and the procedure repeated three times. The last extraction was performed using only hexane.

### Selection and Amplification.

[0378] Selection for binders was performed by incubating the extracted aqueous phase for 30 min in the presence 50-5 nM of biotinylated antigen (See below for exact conditions used per round). If off-rate selections were performed, this incubation was followed by addition of an excess of unbiotinylated antigen, or the parent V_{H} dAb at 1 μM concentration, and incubation in the 5-100 min range. Each emulsion reaction was then divided over 5 wells of a streptavidin coated PCR plate (50 μl/well), incubated for 15 min at 25° C., and washed 4 times with PBS/BSA. Fifty μl of PCR mix containing either OA16/17n primers, PfuUltra buffer, dNTPs, 2.5 u PfuUltra DNA polymerase (Tus) or successive pairs of nested primers, dNTPs, KOD polymerase buffer and 2.5 u KOD polymerase (scArc) was added to each well. PCR was performed for 25 (scArc) or 30 (Tus) cycles. For Tus selections, the PCR product was cleaned and digested with SalI/NotI. The fragment was then ligated in pIE7t³T vector and amplified as described in library construction. For scArc, the PCR product was gel purified and used directly for a next round of selection.

### PEGylation Using Aldehyde and NHS Activated PEGs

[0379] Under appropriate conditions, proteins can be specifically PEGylated via the N-terminus using PEG-aldehyde (PEG-ALD). This has the advantage in that the protein does not require any further engineering to introduce a specific amino acid for modification such as cysteine when using PEG-maleimide. Under non-optimized buffer conditions it is still possible for some of the protein to become modified via lysine residues when using PEG-ALD. An alternative method is to use NHS or SPA activated PEGs which react specifically with surface lysine residues.

### Example 2

### Ligands that Bind IL-4

### IL-4 Receptor Binding Assay (RBA)

[0380] A MAXISORP™ plate (high protein binding ELISA plate, Nunc, Denmark) was coated overnight with 0.5 μg/ml recombinant human IL-4R/Fc (R&D Systems, Minneapolis, USA). The wells were washed three times with 0.1% (v/v) Tween 20 in PBS, followed by three washes with PBS, before blocking with 2% (w/v) BSA in PBS. The plates were washed again before the addition of 10 ng/ml biotinylated-IL-4 (R&D Systems) mixed with a dilution series of anti-IL-4 dAbs or IL-4. IL-4 binding was detected with peroxidase labelled anti-biotin antibody (Stratech, Soham, UK) and then developed with TBM substrate (KPL, Gaithersburg, USA). The reaction was stopped by the addition of HCl and the absorbance read at 450 nm. Anti-IL-4 dAb activity caused a decrease in IL-4 binding to the receptor and therefore a decrease in absorbance compared with the IL-4 only control.

### IL-4 Cell Assay

[0381] Isolated dAbs were tested for their ability to inhibit IL-4 induced proliferation in cultured TF-1 cells (ATCC® catalogue no. CRL-2003). Briefly, 40000 TF-1 cells in phenol red free RPMI media (Gibco, Invitrogen Ltd, Paisley, UK) were placed in the well of a tissue culture microtitre plate and mixed with 1 ng/ml final concentration IL-4 (R&D Systems, Minneapolis, USA) and a dilution of the dAb to be tested. The mixture was incubated for 72 hours at 37° C. 5% CO₂. CELLTITER 96® reagent (colorometric reagent for determining viability, Promega, Madison, USA) was then added and the number of cells per well was quantified by measuring the absorbance at 490 nm. Anti-IL-4 dAb activity caused a decrease in cell proliferation and a corresponding lower A₄₉₀ than IL-4 alone.

Competition BIACORE® with Anti IL-4 dAbs

[0382] These experiments were performed on a BIACORE® 3000 instrument, using a streptavidin coated SA chip (surface plasmon resonance system, Biacore) coupled with ˜400 RU of biotinylated IL-4 (R&D Systems). Analytes were passed over the antigen-coated flow-cell, with in-line referencing against a blank flow-cell, at a flow rate of 30 μl/min in HBS-EP running buffer (Biacore). The first dAb was injected, followed immediately by injection of the second dAb using the Biacore's co-inject function. For this experiment dAbs DOM9-44 (SEQ ID NO:358), DOM9-155-1 (SEQ ID NO:452) and DOM9-112-22 (SEQ ID NO:47) were used. This competition protocol can generally be used to assess competition of a test antibody or fragment with a known dAb (or other antibody polypeptide) for binding to IL-4.

### Allergen Induced Cell Proliferation.

[0383] Blood was collected from donors allergic to house dust mite (HDM). Peripheral blood mononuclear cells (PBMC) were then isolated using a Ficoll gradient. Cells were seeded at 4×10⁶/ml in a 96 well plate and stimulated with HDM at 20-50 ug/ml. Anti-IL-4 dAbs were added at 100 nM at the start of the culture (1.4 ug/ml). Cells were incubated for 5 days, with the addition of 3[H] thymidine for the final 18 hours. Cells were then harvested and proliferation was assessed by determining the amount of 3H incorporated into the cellular DNA.

Primary Selection and Screening for Anti-IL-4 dAbs

[0384] Primary phage selections were performed using the VH and Vk dAb libraries and outputs sub-cloned into the soluble expression vector pDOM5. dAb clones that inhibit binding of IL-4 to IL-4 R were identified by supernatant receptor binding assay (RBA). Clones were then expressed, purified by protein A or protein L and tested as a dose-response in the RBA to estimate the potency with which the clones inhibited the binding of IL-4 to IL-4R. Table 3 shows the results for anti-IL-4 dAbs DOM9-44 (SEQ ID NO:358), DOM9-112 (SEQ ID NO:25), and DOM9-155 (SEQ ID NO:451) in such an RBA assay.

TABLE 3
IL-4 receptor binding assay

| dAb | IC50 (nM) |
|---|---|
| DOM9-44 | 122 |
| DOM9-155 | 100 |
| DOM9-112 | 3 |

Affinity Maturation of Anti-IL-4 dAbs

### DOM9-44 Lineage

[0385] The DOM9-44 lineage was affinity matured using in vitro expression and emulsification. Libraries diversifying CDR2 and CDR3 residues were constructed and used in selections against biotinylated IL-4. Output clones were expressed, purified and screened in the IL-4 receptor binding assay (RBA). The most potent dAb from this lineage was DOM9-44-502 (SEQ ID NO:361), which had a potency of 5.5 nM in the IL-4 RBA (Table 4) and 4.5 nM in the IL-4 cell assay (Table 5).

TABLE 4
IL-4 receptor binding
assay

| dAb | IC50 (nM) |
|---|---|
| DOM9-155-25 | |
| Expt. 1 | 0.73 |
| Expt. 2 | 1 |
| average | 0.86 |
| DOM9-44-502 | |
| Expt. 1 | 4.1 |
| Expt. 2 | 3.6 |
| Expt. 3 | 5.5 |
| Expt. 4 | 8.6 |
| average | 5.5 |
| DOM9-112-168 | |
| Expt. 1 | 1.22 |
| Expt. 2 | 0.64 |
| average | 0.9 |
| DOM9-112-210 | |
| Expt n = 8 | 144 pM |

TABLE 5
IL-4 Induced TF-1 Cell
Proliferation

| dAb | ND50 (nM) |
|---|---|
| DOM9-155-25 | |
| Expt. 1 | 0.55 |
| Expt. 2 | 1.1 |
| average | 0.83 |
| DOM9-44-502 | |
| Expt. 1 | 4.5 |
| DOM9-112-210 | |
| Expt n = 8 | 270 pM |

### DOM9-155 Lineage

[0386] The DOM9-155 lineage was affinity matured using in vitro expression and emulsification. The DOM9-155 dAb (SEQ ID NO:451) was PCR amplified under error-prone conditions and ligated into the Tus vector, followed by a second PCR to amplify the IVT cassette. The libraries were then subjected to sequential rounds of selection against biotinylated IL-4. Ten rounds of selection were performed followed by cloning into the expression vector and overnight supernatant expression. Improved clones were identified by screening on the Biacore and were subsequently used as a template for libraries diversifying residues of the CDR1 by NNS mutagenesis. Output clones were expressed, purified and tested in the IL-4 receptor binding assay and the IL-4 cell assay. The most potent dAbs from the DOM9-155 lineage identified using these methods was DOM9-155-25 (SEQ ID NO:466) with an IC50 of 0.86 nM in the RBA (Table 4) and 0.83 nM in the cell assay (Table 5). Further screening of this output identified two additional dAbs with sub nanomolar potencies: DOM9-155-77 (SEQ ID NO:2393) and DOM9-155-78 (SEQ ID NO: 2394).

### DOM9-112 Lineage

[0387] The DOM9-112 lineage was affinity matured by phage display using an error-prone maturation library, libraries diversifying multiple residues of CDR 1 and 2 libraries diversifying individual residues of the CDR1 and 2. The resulting phage libraries were used in selections against biotinylated IL-4. Outputs were cloned into vector pDOM5 and expression supernatants were screened for improved off-rates compared to the parent. dAbs with improved off-rates were expressed, purified and tested in the IL-4 receptor binding assay (RBA) and cell assay. The most potent dAbs identified using these methods were DOM9-112-155 (SEQ ID NO:118), DOM9-112-168 (SEQ ID NO:131), DOM9-112-174 (SEQ ID NO:137), DOM9-112-199 (SEQ ID NO:162), DOM9-112-200 (SEQ ID NO:163), DOM9-112-202 (SEQ ID NO:165) and DOM9-112-210 (SEQ ID NO:2401) with IC50 values in the range of 0.9 to 3 nM, as measured in the IL-4 RBA (Table 4).

Epitope Mapping of Anti IL-4 dAbs

[0388] To determine the epitope specificity of the anti-IL-4 dAbs, BIACORE® (surface plasmon resonance, Biacore) competition experiments were performed. DOM9-44 (SEQ ID NO:358) dAb was injected over an IL-4 coupled chip, followed by injection of DOM9-155-1 (SEQ ID NO:452) dAb which could not bind to IL-4 after DOM9-44 (SEQ ID NO:358) was bound (FIG. 13). Similarly, DOM9-44 (SEQ ID NO:358) could not bind after DOM9-155-1 (SEQ ID NO:452) was bound. However dAb DOM9-112-22 (SEQ ID NO:47) could bind IL-4 after dAb DOM9-44 (SEQ ID NO:358) was bound and also after dAb 9-155-1 (SEQ ID NO:452) was bound. The results indicated that dAbs DOM9-44 (SEQ ID NO:358) and DOM9-155-1 (SEQ ID NO:452) bound to the same epitope and that DOM9-112-22 (SEQ ID NO:47) bound to a different epitope from DOM9-44 (SEQ ID NO:358) and DOM9-155-1 (SEQ ID NO:452). This competition protocol can generally be used to assess competition (and epitope mapping) of a test antibody or fragment with a known dAb (or other antibody polypeptide) for binding to IL-4.

### Allergen Induced Cell Proliferation.

[0389] PBMC from all allergic donors showed a dose-dependent proliferation when incubated with HDM (house dust mite). The addition of anti-IL-4 dAbs resulted in an inhibition of allergen induced proliferation in the majority of donors. dAb DOM9-44-502 (SEQ ID NO:361) inhibited proliferation of PBMC from 10 out of 12 donors (FIG. 14A), DOM9-155-11 (SEQ ID NO:457) inhibited proliferation of PBMC from 10 out of 12 donors (FIG. 14B) and DOM9-112-22 (SEQ ID NO:47) inhibited proliferation of PBMC from 2 out of 2 donors. The average inhibition in all responding donors was 38%, 34% and 23% inhibition for dAb DOM9-44-502 (SEQ ID NO:361), DOM9-155-11 (SEQ ID NO:457) and DOM9-112-22 (SEQ ID NO:47), respectively. The reason that maximal responses of only 30-40% are observed is most likely because this allergen induced response is not only dependent on IL-4, but is also dependent on other interleukins such as IL-2.

### IL-4 Induced B Cell Proliferation

[0390] Blood was collected from normal blood donors. PBMC were isolated using Ficoll gradient. B cells were then isolated using a negative B cell isolation kit (EasySep Negative isolation kit, Stem Cell Technologies Inc). Purity was in excess of 98% as determined by flow cytometry and staining with CD3, CD4, CD8, CD14, CD14, CD19 and CD23. B cells were then plated at 1×10⁵ cells/well in the presence of IL-4 (10 ng/ml) in plates coated with irradiated CD40L⁺ L cells. Cultures were incubated for 5 days with the addition of 3[H]thymidine for the final 18 hours. Anti-IL-4 dAbs were added at the start of the culture at 10 nM or 100 nM.

Cross-Reactivity with Rhesus and Cynomolgous IL-4.

[0391] A desired requirement of these dAbs would be cross-reactivity with rhesus and cynomolgous IL-4. To that end, DOM9-112-210 (SEQ ID NO:2401), DOM9-155-5 (SEQ ID NO:454), DOM9-155-25 (SEQ ID NO:466), DOM9-155-77 (SEQ ID NO:2393) and DOM9-155-78 (SEQ ID NO:2394) were tested in the TF-1 cell proliferation assay (see above for description in more detail) in which cells are stimulated with human IL-4 (0.5 ng/ml, Peprotech), rhesus IL-4 (0.5 ng/ml, R&D systems) or cynomolgous IL-4 (1:25000 dilution of supernatant containing in-house expressed cynomolgous IL-4). A dose-response of the dAb will determine the ND50 in this set up. A summary of the values obtained is given in the table below (Table 6) and demonstrates cross-reactivity.

TABLE 6

| | | | Cyno IL-4 |
|---|---|---|---|
| dAb | Human IL-4 (nM) | Rhesus IL-4 (nM) | (nM) |
| DOM9-155-5 | 0.3-0.5 | 1.8-2.7 | |
| DOM9-155-77 | 1.1-1.7 | 3.6-5.4 | |
| DOM9-155-78 | 0.5-0.7 | 1.3-2.0 | |
| DOM9-155-25 | 0.75-1.1 | 2.7-4.1 | 2.6-3.8 |
| DOM9-112-210 | 0.27 | 0.4 | 0.6 |

### Example 3

### Ligands that Bind IL-13

### IL-13 Sandwich ELISA

[0392] A MAXISORP™ plate (high protein binding ELISA plate, Nunc, Denmark) was coated overnight with 2.5 μg/ml coating antibody (Module Set, Bender MedSystems, Vienna, Austria), then washed once with 0.05% (v/v) Tween 20 in PBS before blocking with 0.5% (w/v) BSA 0.05% (v/v) Tween 20 in PBS. The plates were washed again before the addition of 25 pg/ml IL-13 (Bender MedSystems) mixed with a dilution series of DOM10 dAb (i.e., an anti-IL-13 dAb) or IL-13. The plates were washed again before binding of IL-13 to the capture antibody was detected using biotin conjugated detection antibody (Module Set, Bender Medsystems), followed by peroxidase labelled Streptavidin (Module Set, Bender MedSystems). The plate was then incubated with TMB substrate (KPL, Gaithersburg, USA), and the reaction was stopped by the addition of HCl and the absorbance read at 450 nm. Anti-IL-13 dAb activity caused a decrease in IL-13 binding and therefore a decrease in absorbance compared with the IL-13 only control.

### IL-13 Receptor Binding Assay (RBA) Using the 8200 Cellular Detection System

[0393] SPHERO™ goat anti-human IgG (H&L) polystyrene particles (0.5% w/v) (goat-anti-human particles, Spherotech, Libertyville, USA) were coated overnight with 20 μg IL-13R alpha 1/Fc chimera or IL-13R alpha 2/Fc chimera (R&D Systems, Minneapolis, USA). The following reagents were then combined in a 384-well black sided clear bottomed FMAT plate (Applied Biosystems, Foster City, USA): dilution series of DOM-10 dAb or 0.1% (w/v) BSA in PBS; 0.5 μg/ml biotinylated anti-IL-13 antibody (R&D Systems); 0.25 μg/ml STREPTAVIDIN ALEXA FLUOR® 647 conjugate (fluorescent probe, Molecular Probes, Invitrogen Ltd, Paisley, UK); 10 ng/ml recombinant human IL-13 (R&D Systems); and 1:10 dilution of IL-13R2/Fc coated particles. The plate was incubated for seven hours before being read in the 8200 cellular detection system (Applied Biosystems). Binding of IL-13 to the receptor coated particle causes a complex to form which is detected as a fluorescent event by the 8200. Anti-IL-13 dAb activity causes a decrease in IL-13 binding and thus a decrease in fluorescent events compared with the IL-13 only control.

### IL-13 Cell Assay

[0394] Isolated dAbs were tested for their ability to inhibit IL-13 induced proliferation in cultured TF-1 cells (ATCC® catalogue no. CRL-2003). Briefly, 40000 TF-1 cells in phenol red free RPMI media (Gibco, Invitrogen Ltd, Paisley, UK) were placed in the well of a tissue culture microtitre plate and mixed with 5 ng/ml final concentration IL-13 (R&D Systems, Minneapolis, USA) and a dilution of the dAb to be tested. The mixture was incubated for 72 hours at 37° C. 5% CO₂. CELLTITER 96® reagent (colorometric reagent for determining viability, Promega, Madison, USA) was then added and the number of cells per well was quantified by measuring the absorbance at 490 nm. Anti-IL-13 dAb activity caused a decrease in cell proliferation and a corresponding lower A₄₉₀ than IL-13 alone.

### BIACORE® Off-Rate Screening

[0395] A streptavidin coated SA chip (Biacore) was coated with approximately 500 RU of biotinylated IL-13 (R&D Systems, Minneapolis, USA). Supernatant containing soluble dAb was diluted 1:5 in running buffer. 50 to 100 ul of the diluted supernatant was injected (kininject) at 50 ul/min flow rate, followed by a 5 minute dissociation phase. Clones with improved off-rates compared to parent were identified by eye, or by measurement using BIAevaluation software v4.1 (Biacore).

Competition BIACORE® with Anti IL-13 dAbs

[0396] These experiments were performed on a BIACORE® 3000 instrument (surface plasmon resonance instrument, Biacore), using a streptavidin coated SA chip (Biacore) coupled with ˜400 RU of biotinylated IL-13 (R&D Systems). Analytes were passed over the antigen-coated flow-cell, with in-line referencing against a blank flow-cell, at a flow rate of 30 μl/min in HBS-EP running buffer (Biacore). The first dAb DOM10-176-535 (SEQ ID NO:1362) was injected, followed immediately by injection of dAb DOM 10-53-99 (SEQ ID NO:738), using the Biacore's co-inject function. This competition protocol can generally be used to assess competition of a test antibody or fragment with a known dAb (or other antibody polypeptide) for binding to IL-13.

### Competition and Epitope Mapping

[0397] Epitope Mapping of Anti IL-13 dAbs

[0398] To determine the epitope specificity of the anti-IL-13 dAbs, Biacore competition experiments were performed. dAb DOM10-176-535 (SEQ ID NO:1362) was injected, followed immediately by injection of dAb DOM10-53-99 (SEQ ID NO:738). dAb DOM10-53-99 (SEQ ID NO:738) did not bind to IL-13 to which dAb DOM10-176-535 (SEQ ID NO:1362) has already bound. This indicates that these dAbs bound to the same epitope. This competition protocol can generally be used to assess competition (and epitope mapping) of a test antibody or fragment with a known dAb (or other antibody polypeptide) for binding to IL-13. The epitopes for a second set of dAbs was determined using a slightly modified BIAcore protocol in which first dAbs were injected over an IL-13 surface, then a high affinity binding dAb (DOM10-53-386 (SEQ ID NO:934)) was injected at high concentration (5 μM) saturating the IL-13 surface and finally the dAbs were again injected. If there is a difference between binding prior and post saturation with DOM10-53-386 (SEQ ID NO:934), the epitopes are at least partially overlapping. Using this experimental setup, it was determined that the Vk dAbs DOM10-212 (SEQ ID NO:2016), DOM10-270 (SEQ ID NO:1915), DOM10-213 (SEQ ID NO:1904) and DOM10-215 (SEQ ID NO:1906) share the same epitope as DOM10-53-386 (SEQ ID NO:934), whereas DOM10-208 (SEQ ID N01886): and DOM10-224 (SEQ ID NO:1911) have a different epitope. The same BIAcore setup was used for the injection of the Vh dAbs DOM10-416 (SEQ ID NO:1834), DOM10-236 (SEQ ID NO:1804), DOM10-273 (SEQ ID NO:1818), DOM10-275 (SEQ ID NO:1871), DOM10-276 (SEQ ID NO:1872) and DOM10-277 (SEQ ID NO:1873). All these dAbs were shown to have at least partially overlapping epitopes with DOM10-53-386 (SEQ ID NO:934). This demonstrates that less dAb binds once DOM10-53-386 (SEQ ID NO:934) has been injected.

### IL-13 Induced B Cell Proliferation

[0399] Blood was collected from normal blood donors. PBMC were isolated using Ficoll gradient. B cells were then isolated using a negative B cell isolation kit (EasySep Negative isolation kit, Stem Cell Technologies Inc). Purity was in excess of 98% as determined by flowcytometry and staining with CD3, CD4, CD8, CD14, CD19 and CD23. B cells were then plated at 1×10⁵ cells/well in the presence of IL-13 (10 ng/ml) in plates coated with irradiated CD40L⁺ L cells. Cultures were incubated for 5 days with the addition of 3[H]thymidine for the final 18 hours. Anti-IL-13 dAbs were added at the start of the culture at 10 or 100 nM.

### Formatting:

### Site Specific PEGylation of DOM10-53-343 Using PEG-Maleimide

[0400] The anti-IL13 dAb DOM10-53-343 (SEQ ID NO:891) was engineered with a cysteine at the C-terminus of the protein. Expression and purification of the dAbs was performed as described above. The cysteine engineered dAb was specifically modified with a branched 40K PEG2-MAL to give monomeric modified protein. Other PEG formats are available such as linear PEG-MAL which may also be used to give PEGylated monomers, e.g. 30K or 40K linear PEG.

[chemical structure]

mPEG-MAL formats may be used to PEGylate a monomeric dAb. The PEGs may be of MW from 500 to 60,000 (e.g., from 2,000 to 40,000) in size and either linear or branched in nature

[0401] 1 ml of 160 μM DOM10-53-343cys was reduced with 5 mM dithiothreitol and left at room temperature for 20 minutes. The sample was then buffer exchanged using a PD-10 column (Amersham Pharmacia), to remove the reducing agent. The column had been pre-equilibrated with 5 mM EDTA, 20 mM BIS-TRIS pH 6.5, 10% glycerol, and the sample applied and eluted following the manufacturer's guidelines. The sample (3.5 ml of ˜50 μM dAb) was then mixed directly with a three fold molar excess of 40K PEG-MAL (˜20 mg). The reaction was left to proceed at room temperature for 3 hours.

### Purification of PEGylated DOM10-53-343 Cys Monomer by Anion Exchange

[0402] The sample was further purified using anion exchange chromatography (1 ml Resource Q column), to remove any unreacted PEG and protein. The sample was diluted 3-fold into equilibration buffer (50 mM TRIS pH 8.0), before being applied on to the column which had also been equilibrated in the same buffer. The PEGylated material was separated from the unmodified dAb by running a linear sodium chloride gradient from 0 to 500 mM, in 50 mM TRIS buffer over 20 column volumes. Fractions containing PEGylated dAb only were identified using SDS-PAGE and then pooled.

### N-Terminal PEGylation Using 30K PEG-ALD

[0403] The anti-IL13 dAb DOM10-53-338 (SEQ ID NO:886) was PEGylated via the N-terminus α-amino group) using a 30K PEG-ALD. The dAb was buffer exchanged into 20 mM phosphate buffer pH6.0 to give a final protein concentration of 2 mg/ml (˜166 μM). A 5-fold molar excess of PEG-ALD (830 μM polymer) was added directly to the dAb solution followed by the addition of 2 mM sodium cyanoborohydride to reduce the transient imine linkage to an amine which is stable to hydrolysis. The reaction was then allowed to proceed overnight at room temperature. The sample was further purified using anion exchange chromatography as described above.

### PEGylation of Surface Lysine Residues Using 40K PEG2—NHS

[0404] The anti-IL13 dAb DOM10-53-338 (SEQ ID NO:886) was PEGylated via surface lysine residues using 40K PEG2—NHS. The dAb was buffer exchanged into 20 mM phosphate buffer pH8.0 to give a final protein concentration of 2 mg/ml (˜166 μM). A 5-fold molar excess of PEG-NHS (830 μM polymer) was added directly to the dAb solution and the reaction was allowed to proceed at room temperature overnight. The sample was further purified using anion exchange chromatography as described above.

Primary Selection and Screening for Anti-IL-13 dAbs

[0405] Primary phage selections were performed using VH and Vk dAb libraries and outputs sub-cloned into soluble expression vector pDOM5. dAb clones that inhibit binding of IL-13 to IL-13RI were identified by supernatant RBA. Clones were then expressed, purified by protein A or protein L and tested as a dose-response in the RBA to determine the potency with which the clones inhibited the binding of IL-13 to IL-13RI. Table 7 shows the results for anti-IL-13 dAbs DOM10-53 (SEQ ID NO:651) and DOM10-176 (SEQ ID NO:1285) in such an RBA assay, where their IC₅₀ values are 150 and 100 nM, respectively, while the rest have IC50 values in micromolar range.

TABLE 7
IL-13 receptor I binding assay

| dAb | IC50 (nM) |
|---|---|
| DOM10-53 | 150 |
| DOM10-176 | 100 |
| DOM10-416 | 6000 |
| DOM10-273 | 600 |
| DOM10-275 | 1000 |
| DOM10-276 | 3000 |

Affinity Maturation of Anti-IL-13 dAbs

### DOM10-176 Lineage

[0406] The nucleic acid encoding dAb DOM10-176-535 (SEQ ID NO:1362) was PCR amplified under error-prone conditions and ligated in the scArc vector, followed by a second PCR to amplify the IVT cassette. The libraries were then subjected to sequential rounds of selection, with antigen concentrations being stepwise decreased from 50 to 5 nM.

[0407] A separate library diversifying positions 52-54 in CDR2 of DOM10-176 (SEQ ID NO:1285) was constructed and used in further selections. The output clones were expressed as supernatants and screened for improved off-rates compared to the parent. dAbs with improved off-rates were expressed, purified and tested in the IL-13 sandwich ELISA and cell assay. The mutations from the best dAbs identified from both of these selections were combined, creating DOM10-176-535 (SEQ ID NO:1362). This was the most potent dAb of the DOM10-176 lineage, with an IC50 value in the RBA in the range of 0.5 nM and a value of 0.77 nM in the IL-13 cell assay (Tables 8 and 9).

TABLE 8
IL-13 assays
IL-13 receptor I binding
assay

| | IC50 (nM) |
|---|---|
| DOM10-176-535 | |
| Expt. 1 | 0.56 |
| Expt. 2 | 0.76 |
| Expt. 3 | 0.63 |
| Expt. 4 | 0.41 |
| average | 0.59 |

IL-13 sandwich ELISA

| | IC50 (pM) |
|---|---|
| DOM10-53-234 | |
| Expt. 1 | 87 |
| Expt. 2 | 81 |
| Expt. 3 | 87 |
| Expt. 4 | 40 |
| average | 73 |
| DOM10-53-396 | |
| Expt. 1 | 55 |
| Expt. 2 | 30 |
| average | 42 |

TABLE 9
IL-13 Induced TF-1 Cell
Proliferation

| | ND50 (nM) |
|---|---|
| DOM10-176-535 | 0.77 |
| DOM10-53 lineage | |
| 10-53-234 | 43 |
| 10-53-344 | 100 (n = 2) |

### DOM10-53 Lineage

[0408] The DOM10-53 lineage was affinity matured by phage display using an error-prone maturation library, libraries diversifying multiple residues of CDR 1, 2 and 3 and libraries diversifying individual residues of the CDR1, 2 and 3. The resulting phage libraries were used in selections against biotinylated IL-13. Outputs were cloned into vector pDOM5 and expression supernatants were screened for improved off-rates compared to the parent. dAbs with improved off-rates were expressed, purified and tested in the IL-13 sandwich ELISA and cell assay. The most potent dAbs identified using these methods were DOM10-53-223 (SEQ ID NO:774), DOM10-53-234 (SEQ ID NO:785), DOM10-53-316 (SEQ ID NO:866), DOM10-53-339 (SEQ ID NO:887), DOM10-53-344 (SEQ ID NO:892) and DOM10-53-396 (SEQ ID NO:944), with potency values as estimated in the IL-13 sandwich ELISA and IL-13 cell assay in the range of 100 pM to 40 pM (Table 8 and 9).

### Inhibition of IL-13 Binding to IL-13Rα2

[0409] Anti-IL-13 dAbs were tested for their ability to inhibit binding of IL-13 to IL13Rα2 in a competition assay. Table 10 shows that both DOM10-53-316 (SEQ ID NO:866) and DOM10-176-535 (SEQ ID NO:1362) were able to inhibit the binding of IL-13 to IL13Rα2 with IC50 values of 2 nM and 8 nM respectively.

TABLE 10
IL-13 receptor α2 binding assay

| dAb | IC50 (nM) |
|---|---|
| DOM10-53-316 | 1.2 |
| DOM10-176-535 | 7.9 |

### Binding to Variant IL-13 (R130Q)

[0410] Genetic variants of IL-13 have been associated with an increased risk for asthma (Heinzmann et al. Hum Mol. Genet. (2000) 9549-59) and bronchial hyperresponsiveness (Howard et al., Am. J. Resp. Cell Molec. Biol. (2001) 377-384). Therefore it was determined whether the anti-IL-13 dAbs are able bind variant IL-13 (R130Q), the TF-1 proliferation assay was performed with variant IL-13 (R130Q), and increasing amounts of dAb. Table 11 shows that both DOM10-53-316 (SEQ ID NO:866) and DOM10-176-535 (SEQ ID NO:1362) were able to inhibit variant IL-13 induced TF-1 proliferation with ND50 values of approximately 0.5 nM and 8 nM respectively.

TABLE 11
Variant and human IL-13

| | IC50 (nM) |
|---|---|
| DOM10-53-316 | 1 |
| Human IL-13 | 0.39 |
| Variant IL-13 | 0.52 |
| DOM10-176-535 | |
| Human IL-13 | 6 |
| Variant IL-13 | 7.8 |

Cross-Reactivity with Rhesus and Cynomolgous IL-13.

[0411] A desired requirement of these dAbs would be cross-reactivity with rhesus and cynomolgous IL-13. To that end, DOM10-53-344 (SEQ ID NO:892) and DOM10-53-434 (SEQ ID NO:2053) were tested in the TF-1 cell proliferation assay (see above for description in more detail) in which cells are stimulated with human IL-13 (5 ng/ml, Peprotech), rhesus IL-13 (5 ng/ml, R&D systems) or cynomolgous IL-13 (1:4000 dilution of supernatant containing in-house expressed cynomolgous IL-13). A dose-response of the dAb will determine the ND50 in this set up. A summary of the values obtained are given in the table below (Table 12) and demonstrate cross-reactivity.

TABLE 12

| dAb | Human IL-4 | Rhesus IL-4 | Cyno IL-4 | |
|---|---|---|---|---|
| DOM10-53-344 | 100 pM | n.d. | 980 | pM |
| DOM10-53-434 | 600 pM | 2.8 nM | 5.6 | nM |

### DOM10-416, DOM10-273 DOM10-275 and DOM10-276 Lineages.

[0412] The error-prone PCR libraries of V_{H} dAbs DOM10-416 (SEQ ID NO:1834),

[0413] DOM10-236 (SEQ ID NO:1804), DOM10-273 (SEQ ID NO:1818), DOM10-275 (SEQ ID NO:1871), DOM10-276 (SEQ ID NO:1872) and DOM10-277 (SEQ ID NO:1873) were prepared and quantified as described above. The rest of the ligation mix was used as a template for the second, regular Taq polymerase (SuperTaq, HT Biotechnology Ltd, Cambridge, UK) catalysed PCR reaction with primers AS11 and AS17 to amplify the IVT cassette. DOM10-275 (SEQ ID NO:1871) and DOM10-276 (SEQ ID NO:1872) were kept separate during the affinity maturation reaction, DOM10-273 (SEQ ID NO:1818) and DOM10-416 (SEQ ID NO:1834) were pooled. The libraries were then subjected to ten rounds of selection. In the first four rounds of selection the antigen concentration was 75 nM, in the next two rounds 60 mM, followed by two rounds at 45 nM and the final two rounds at 30 nM.

[0414] The selection output was cloned into pDOM5 expression vector and the culture supernatants were screened by surface plasmon resonance on BIAcore 1000. A number of clones with improved properties were identified. Surprisingly, the improved clones were mostly characterized not by point mutations from error-prone PCR, but by recombination events between the clones. DOM10-275-1 (SEQ ID NO:1918) comprises the CDR1 and CDR2 of DOM10-275 (SEQ ID NO:1871) and CDR3 of DOM10-273 (SEQ ID NO:1818). DOM10-276-2 (SEQ ID NO:1919) comprises of the CDR1 and CDR3 of DOM10-276 (SEQ ID NO:1872) and CDR2 of DOM10-416 (SEQ ID NO:1834). DOM10-276-2 (SEQ ID NO:1919) comprises of the CDR1 and CDR2 of DOM10-416 (SEQ ID NO:1834) and CDR3 of DOM10-276 (SEQ ID NO:1872). Clones from the error-prone PCR library selection are listed as DOM10-275-1 (SEQ ID NO:1918), DOM10-276-2 (SEQ ID NO:1919), DOM10-276-3 (SEQ ID NO:1920), DOM10-275-3 (SEQ ID NO:1979), DOM10-277-2 (SEQ ID NO:1980), DOM10-277-3 (SEQ ID NO:1981), DOM10-273-1 (SEQ ID NO:1982), DOM10-273-2 (SEQ ID NO:1983), DOM10-275-2 (SEQ ID NO:1984), DOM10-275-4 (SEQ ID NO:1985), DOM10-276-1 (SEQ ID NO:1986), DOM10-276-4 (SEQ ID NO:1987) and DOM10-277-1 (SEQ ID NO:1988)

TABLE 13
IL-13 assays
IL-13 BIAcore binding assay
DOM10-275-1

| | Kd (nM) |
|---|---|
| Expt. 1 | 25 |
| Expt. 2 | 28 |
| average | 27 |

IC50 (nM)

IL-13 receptor I binding assay
DOM10-275-1

| | |
|---|---|
| Expt. 1 | 13 |
| Expt. 2 | 128 |
| average | 70 |

IL-13 sandwich ELISA
DOM10-275-1

| | |
|---|---|
| Expt. 1 | 38 |

IL-13 cell binding assay

| | |
|---|---|
| Expt. 1 | 37 |

Targeted Diversification Libraries of DOM10-273, DOM10-275 and DOM10-276 VH dAbs.

[0415] V_{H} domain antibodies DOM10-273 (SEQ ID NO:1818), DOM10-275 (SEQ ID NO:1871) or DOM10-276 (1872) were also affinity matured by diversification at positions 52, 54, 55, 57 and 59 of CDR2 and at positions 101, 102 and 104 of CDR3. At both CDRs two targeted positions at a time were randomized in all possible combinations. The libraries targeting the same CDR in the respective parent clones were pooled and recombined in framework three by SOE PCR, giving rise to a recombined library with four randomized residues per gene, two in CDR2 and two in CDR3, in all possible combinations surrounding their respective CDR1 regions (calculated diversity at nucleotide level 3×10⁷ different clones), i.e. three libraries in total. The same was repeated by pooling the 5′ and 3′ PCR fragments of all parent clones before the SOE PCR step, creating a library of about 10⁸ theoretical diversity. Finally, the 5′ fragment of DOM10-275 set of libraries encoding CDR1 and CDR2 was recombined with the 3′ set of CDR3 libraries of DOM10-273.

### Targeted Diversification Library 1.

[0416] The CDR2 region of DOM10-273 V_{H} dAb (SEQ ID NO:1818) in pDOM5 vector was diversified in ten PCR reactions using 10 pg of template and SuperTaq DNA polymerase. The following forward primers: AS818 (SEQ ID NO:1921), AS819 (SEQ ID NO:1922), AS820 (SEQ ID NO:1923), AS821 (SEQ ID NO:1924), AS822 (SEQ ID NO:1925), AS823 (SEQ ID NO:1926), AS824 (SEQ ID NO:1927), AS825 (SEQ ID NO:1928), AS826 (SEQ ID NO:1929), AS827 (SEQ ID NO:1930) AS828 (SEQ ID NO:1931) were all used to run PCR amplification reactions using AS339 (SEQ ID NO:1951) as the reverese primer. The reaction products were pooled and gel purified on 2% E-Gel (Invitrogen, USA), forming Fragment Set 1. Fragment Set 1 was thereafter SOE PCR extended with the PCR reaction product formed from the amplification of the same vector construct with AS9 forward primer (SEQ ID NO:1916) and AS829 reverse primer (SEQ ID NO:1932). The SOE PCR comprised of 15 cycles of amplification with SuperTaq DNA polymerase at 50° C. annealing step. The formation of SOE product was verified by gel electrophoresis and a 5 μl aliquot of the reaction was further amplified with primers AS639 (SEQ ID NO:1952) and AS65 (TTGTAAAACGACGGCCAGTG; SEQ ID NO:1917). The CDR3 region of DOM10-273 V_{H} dAb in pDOM5 vector was diversified in three PCR reactions using 10 pg of template and SuperTaq DNA polymerase. The following forward primers: AS830 (SEQ ID NO:1933), AS831 (SEQ ID NO:1934) and AS832 (SEQ ID NO:1935) were each combined with AS339 (CAGGAAACAGCTATGACCATG; SEQ ID NO:1951). The reaction products were pooled and gel purified on 2% E-Gel (Invitrogen, USA), forming Fragment Set 2. Fragment Set 2 was thereafter SOE PCR extended with the PCR reaction product formed from the amplification of the same vector construct with AS9 forward primer (SEQ ID NO:1916) and AS833 reverse primer (SEQ ID NO:1936). The SOE PCR comprised of 15 cycles of amplification with SuperTaq DNA polymerase at 50° C. annealing step. The formation of SOE product was verified by gel electrophoresis and a 5 μl aliquot of the reaction was further amplified with primers AS339 (SEQ ID NO:1951) and AS65 (SEQ ID NO:1917).

[0417] The recombination reaction of CDR2 and CDR3-focused libraries of DOM10-273 (SEQ ID NO:1818), based on Fragment Sets 1 and 2, was performed in framework 3 region. The CDR2-library carrying fragments were generated by PCR amplification of Fragment Set 1 with primers AS639 (SEQ ID NO:1952) and AS660 (SEQ ID NO:1976). The CDR3-library carrying fragment was generated by PCR amplification of Fragment set 2 with primers AS659 (SEQ ID NO:1975) and AS65 (SEQ ID NO:1917). The SOE reaction was carried out as before, except that the extended product was reamplified with primers AS297 (SEQ ID NO:1977) and AS298 (SEQ ID NO:1978). The amplification reaction product was gel purified, cut with Sal I and Not I enzymes, re-purified on 2% E-Gels and then ligated into Sal I/Not I-cut pIE2a²A vector.

### Targeted Diversification Library 2.

[0418] The CDR2 region of DOM10-275 V_{H} dAb in pDOM5 vector was diversified in ten PCR reactions using 10 pg of template and SuperTaq DNA polymerase. The following forward primers: AS836 (SEQ ID NO:1939), AS837 (SEQ ID NO:1940), AS838 (SEQ ID NO:1941), AS839 (SEQ ID NO:1942), AS840 (SEQ ID NO:1943), AS841 (SEQ ID NO:1944), AS842 (SEQ ID NO:1945), AS843 (SEQ ID NO:1946), AS844 (SEQ ID NO:1947), AS845 (SEQ ID NO:1948) AS846 (SEQ ID NO:1949) were all used to run PCR amplification reactions using AS339 (SEQ ID NO:1951) as the reverse primer. The reaction products were pooled and gel purified on 2% E-Gel (Invitrogen, USA), forming Fragment Set 3. Fragment Set 3 was thereafter SOE PCR extended, as described above, with the PCR reaction product formed from the amplification of the same vector construct with AS9 forward primer (SEQ ID NO:1916) and AS847 reverse primer (SEQ ID NO:1950). The formation of SOE product was verified by gel electrophoresis and a 5 μl aliquot of the reaction was further amplified with primers AS65 (SEQ ID NO:1917) and AS639 (SEQ ID NO:1952). The CDR3 region of DOM10-273 V_{H} dAb in pDOM5 vector was diversified in three PCR reactions using 10 pg of template and SuperTaq DNA polymerase. The following forward primers: AS848 (SEQ ID NO:1953), AS849 (SEQ ID NO:1954) and AS850 (SEQ ID NO:1955) were each combined with AS339 (SEQ ID NO:1951). The reaction products were pooled and gel purified on 2% E-Gel (Invitrogen, USA), forming Fragment Set 4. Fragment Set 4 was thereafter SOE PCR extended with the PCR reaction product formed from the amplification of the same vector construct with AS9 forward primer (SEQ ID NO:1916) and AS851 reverse primer (ATAAGCTTTCGCACAGTAATATAC; SEQ ID NO:1956). The formation of SOE product was verified by gel electrophoresis and a 5 μl aliquot of the reaction was further amplified with primers AS339 (SEQ ID NO:1951) and AS65 (SEQ ID NO:1917).

[0419] The recombination reaction of CDR2 and CDR3-focused libraries of DOM10-275, based on Fragment Sets 3 and 4, was performed in framework 3 of the dAb molecule. The CDR2-library carrying fragments were generated by PCR amplification of Fragment Set 3 with primers AS639 (SEQ ID NO:1952) and AS660 (SEQ ID NO:1976). The CDR3-library carrying fragment was generated by PCR amplification of Fragment set 4 with primers AS659 (SEQ ID NO:1975) and AS65 (SEQ ID NO:1917). The SOE reaction was carried out as above, except that the extended product was reamplified with primers AS297 (SEQ ID NO:1977) and AS298 (SEQ ID NO:1978). The amplification reaction product was gel purified, cut with Sal I and Not I enzymes, re-purified on 2% E-Gels and then ligated into Sal I/Not I-cut pIE2a²A vector.

### Targeted Diversification Library 3.

[0420] The CDR2 region of DOM10-276 V_{H} dAb in pDOM5 vector was diversified in ten PCR reactions using 10 pg of template and SuperTaq DNA polymerase. The following forward primers: AS854 (SEQ ID NO:1959), AS855 (SEQ ID NO:1960), AS856 (SEQ ID NO:1961), AS857 (SEQ ID NO:1962), AS858 (SEQ ID NO:1963), AS859 (SEQ ID NO:1964), AS860 (SEQ ID NO:1965), AS861 (SEQ ID NO:1966), AS862 (SEQ ID NO:1967), AS863 (SEQ ID NO:1968) AS864 (SEQ ID NO:1969) were all used to run PCR amplification reactions using AS339 (SEQ ID NO:1951) as the reverse primer. The reaction products were pooled and gel purified on 2% E-Gel (Invitrogen, USA), forming Fragment Set 5. Fragment Set 5 was thereafter SOE PCR extended, as described above, with the PCR reaction product formed from the amplification of the same vector construct with AS9 forward primer (SEQ ID NO:1916) and AS865 reverse primer (SEQ ID NO:1970). The formation of SOE product was verified by gel electrophoresis and a 5 μl aliquot of the reaction was further amplified with primers AS65 (SEQ ID NO:1917) and AS639 (SEQ ID NO:1952). The CDR3 region of DOM10-273 V_{H} dAb in pDOM5 vector was diversified in three PCR reactions using 10 pg of template and SuperTaq DNA polymerase. The following forward primers: AS866 (SEQ ID NO:1971), AS867 (SEQ ID NO:1972) and AS868 (SEQ ID NO:1973) were each combined with AS339 (SEQ ID NO:1951). The reaction products were pooled and gel purified on 2% E-Gel (Invitrogen, USA), forming Fragment Set 6. Fragment Set 6 was thereafter SOE PCR extended with the PCR reaction product formed from the amplification of the same vector construct with AS9 forward primer (SEQ ID NO:1916) and AS869 reverse primer (ATAAGCTTTCGCACAGTAATATAC; SEQ ID NO:1974). The formation of SOE product was verified by gel electrophoresis and a 5 μl aliquot of the reaction was further amplified with primers AS339 (SEQ ID NO:1951) and AS65 (SEQ ID NO:1917).

[0421] The recombination reaction of CDR2 and CDR3-focused libraries of DOM10-276, based on Fragment Sets 5 and 6, was performed in framework 3 of the dAb molecule. The CDR2-library carrying fragments were generated by PCR amplification of Fragment Set 3 with primers AS639 (SEQ ID NO:1952) and AS660 (SEQ ID NO:1976). The CDR3-library carrying fragment was generated by PCR amplification of Fragment set 4 with primers AS659 (SEQ ID NO:1975) and AS65 (SEQ ID NO:1917). The SOE reaction was carried out as above, except that the extended product was reamplified with primers AS297 (SEQ ID NO:1977) and AS298 (SEQ ID NO:1978). The amplification reaction product was gel purified, cut with Sal I and Not I enzymes, re-purified on 2% E-Gels and then ligated into Sal I/Not I-cut pIE2a²A vector.

### Targeted Diversification Library 4.

[0422] The recombination reaction of all CDR2 and CDR3-focussed libraries across all three V_{H} dAbs DOM10-273 (SEQ ID NO:1818), DOM10-275 (SEQ ID NO:1871) and DOM10-276 (SEQ ID NO:1872) was performed in framework 3 of the dAb molecule. The CDR2-library carrying fragments were generated by PCR amplification of libraries made from Fragment Sets 1, 3 and 5 with primers AS639 (SEQ ID NO:1952) and AS660 (SEQ ID NO:1976). The CDR3-library carrying fragment was generated by PCR amplification of libraries made from Fragment Sets 2, 4 and 6 with primers AS659 (SEQ ID NO:1975) and AS65 (SEQ ID NO:1917). The SOE reaction was carried out as before, except that the extended product was reamplified with primers AS297 (SEQ ID NO:1977) and AS298 (SEQ ID NO:1978). The amplification reaction product was gel purified, cut with Sal I and Not I enzymes, re-purified on 2% E-Gels and then ligated into Sal I/Not I-cut pIE2a²A vector.

### Targeted Diversification Library 5.

[0423] The recombination reaction of all CDR2-focused library of DOM10-273 (SEQ ID NO:1818) with the CDR3-focused library of DOM10-273 was performed in framework 3 of the dAb molecule. The CDR2-library carrying fragments were generated by PCR amplification of library made from Fragment Set 3 using primers AS639 (SEQ ID NO:1952) and AS660 (SEQ ID NO:1976). The CDR3-library carrying fragment was generated by PCR amplification of libraries made from Fragment Sets 2 using primers AS659 (SEQ ID NO:1975) and AS65 (SEQ ID NO:1917). The SOE reaction was carried out as above, except that the extended product was reamplified with primers AS297 (SEQ ID NO:1977) and AS298 (SEQ ID NO:1978). The amplification reaction product was gel purified, cut with Sal I and Not I enzymes, re-purified on 2% E-Gel and then ligated into Sal I/Not I-cut pIE2a²A vector.

Selections from Targeted Diversification Libraries of DOM10-273 DOM10-275 and DOM10-276 Lineages.

[0424] Targeted diversification libraries of DOM10-273 (SEQ ID NO:1818), DOM10-275 (SEQ ID NO:1871) and DOM10-276 (SEQ ID NO:1872) lineages were ligated and quantified as described above for the error-prone PCR libraries. The libraries were then subjected to ten rounds of selection. In the first round of selection the antigen concentration was 40 nM, in the second round 20 nM, followed by eight rounds at 10 nM. The competitor dAb DOM10-275-1 (SEQ ID NO:1918) was applied at 1 μM concentration starting from the fourth round of selection for 10, 20, 20, 30, 50, 90 and 90 minutes, after 15-minute equilibration with the antigen. The selection output was cloned into pDOM5 expression vector and the culture supernatants were screened by surface plasmon resonance on BIAcore 1000. A number of clones were identified (for example, DOM10-275-13 (SEQ ID NO:1989), DOM10-275-15 (SEQ ID NO:1990), DOM10-275-20 (SEQ ID NO:1991), DOM10-275-8 (SEQ ID NO:1992), DOM10-276-13 (SEQ ID NO:1993), DOM10-276-14 (SEQ ID NO:1994), DOM10-276-15 (SEQ ID NO:1995), DOM10-276-17 (SEQ ID NO:1996), DOM10-276-7 (SEQ ID NO:1997), DOM10-276-8 (SEQ ID NO:1998), DOM10-275-11 (SEQ ID NO:1999), DOM10-275-12 (SEQ ID NO:2000), DOM10-275-14 (SEQ ID NO:2001), DOM10-275-16 (SEQ ID NO:2002), DOM10-275-17 (SEQ ID NO:2003), DOM10-275-5 (SEQ ID NO:2004), DOM10-275-6 (SEQ ID NO:2005), DOM10-275-7 (SEQ ID NO:2006), DOM10-275-9 (SEQ ID NO:2007), DOM10-276-10 (SEQ ID NO:2008), DOM10-276-11 (SEQ ID NO:2009), DOM10-276-12 (SEQ ID NO:2010), DOM10-276-16 (SEQ ID NO:2011), DOM10-276-5 (SEQ ID NO:2012), DOM10-276-6 (SEQ ID NO:2013), DOM10-276-9 (SEQ ID NO:2014)).

TABLE 14
IL-13 assays
IL-13 BIAcore binding assay
DOM10-276-15

| | Kd (nM) |
|---|---|
| Expt. 1 | 1.5 |
| | IC50 (nM) |

IL-13 sandwich ELISA
DOM10-276-15

| | |
|---|---|
| Expt. 1 | 100 |

IL-13 cell binding assay

| | |
|---|---|
| Expt. 1 | 90 |

Epitope Mapping of Anti-IL-13 dAbs

[0425] To determine the epitope specificity of the anti-IL-13 dAbs, Biacore competition experiments were performed. dAb DOM10-176-535 (SEQ ID NO:1362) was injected, followed immediately by injection of dAb DOM10-53-99 (SEQ ID NO:738). dAb DOM10-53-99 (SEQ ID NO:738) did not bind to IL-13 to which dAb DOM10-176-535 (SEQ ID NO:1362) has already bound. This indicates that these dAbs bound to the same epitope. This competition protocol can generally be used to assess competition (and epitope mapping) of a test antibody or fragment with a known dAb (or other antibody polypeptide) for binding to IL-13.

### B Cell Proliferation Assay

[0426] It has been shown previously that CD40L is able to activate cells to be responsive to IL-13. Indeed all donors tested in this study showed a dose-dependent proliferation when their B cells were incubated with irradiated CD40L+L cells and increasing concentrations of IL-13. As negative controls B cells alone or CD40L transfected L cells alone were used. The addition of anti-IL-13 dAbs DOM10-53-338 (SEQ ID NO:886) and DOM10-176-535 (SEQ ID NO:1362) resulted in an inhibition of IL-13 induced proliferation of B cells from all donors (FIG. 15). With both dAbs DOM10-53-338 (SEQ ID NO:886) and DOM10-176-535 (SEQ ID NO:1362) the average inhibition was 80% and 100% at concentrations of 10 nM and 100 nM respectively. Complete inhibition of the B cell proliferation was also observed with 3 μg/ml of positive control anti-IL 13 mAb (R&D). Control dAbs that did not bind IL-13 failed to inhibit this B cell proliferation.

### PEGylated Monomer

[0427] The anti-IL13 dAb DOM10-53-338 (SEQ ID NO:886) was PEGylated via the N-terminus using a 30K aldehyde PEG moiety or via surface lysines using the 40K PEG2—NHS activated moiety. The anti-IL13 dAbs DOM10-53-343 (SEQ ID NO:891) was also cloned with a cysteine at the C-terminus of the protein. This molecule was PEGylated via the C terminus using PEG-Maleimide with a branched 40K PEG2-MAL moiety. To determine the effect of PEGylation the PEGylated DOM10-53-338 dAbs were tested for their ability to inhibit IL-13 binding in the IL-13 receptor binding assay and to inhibit IL-13 induced TF-1 cell proliferation. The potency of both the 30K PEGylated DOM10-53-338 dAb and the 40K PEGylated DOM10-53-338 dAb was maintained in the IL-13 receptor binding assay (Table 15) and in the IL-13 induced TF-1 cell proliferation assay (Table 15). To determine the effect of C-terminal PEGylation, the PEGylated (40K PEG2-MAL) DOM10-53-343 dAbs were tested for their ability to inhibit IL-13 binding in the IL-13 receptor binding assay (Table 15). The potency of the C-terminal PEGylated DOM10-53-343 dAb was slightly improved compared to the native DOM10-53-343 dAb in the IL-13 receptor binding assay.

TABLE 15
PEGylated anti IL-13 dAbs

| | IC50 (pM) |
|---|---|
| IL-13 receptor I binding assay | |
| DOM10-53-338 | 387 |
| DOM10-53-338 30K PEG ALD | 169 |
| DOM10-53-338 40K PEG2 NHS | 226 |
| IL-13 induced TF-1 proliferation | |
| DOM10-53-338 | 423 |
| DOM10-53-338 30K PEG ALD | 181 |
| DOM10-53-338 40K PEG2 NHS | 231 |
| IL-13 receptor I binding assay | |
| DOM10-53-343 | 136 |
| DOM10-53-343 40K PEG2 MAL | 33 |

Biophysical Properties of Anti-IL-13 dAbs

[0428] In order to develop a product for pulmonary delivery it is desired that the molecule has good biophysical properties. Poor chemical stability and physical stability may reduce the biological activity. Pulmonary delivered proteins may be exposed to additional stress e.g shearing forces and increased temperatures in the nebulising device. The lungs can metabolise some of the delivered dose and in some disease indications high levels of proteases can be present that can affect the biological activity. To this end we investigated the solution state by Multi Angle Light Scattering (MALS) and the melting temperature as determined by differential scanning calorimetry (DSC) of the DOM10-53 lineage molecules.

### SEC-MALLS (Multi Angle Laser Light Scattering)

[0429] The in-solution properties of dAb proteins were determined by an initial separation on SEC (size exclusion chromatography; TSKgel G2000/3000SWXL, Tosoh Biosciences, Germany; BioSep-SEC-S2000/3000, Phenomenex, Calif., USA) and subsequent on-line detection of eluting proteinaceous material by UV (Abs280 nm), RI (refractive index) and light scattering (laser at 685 nm). The proteins were at an initial concentration of 0.5-1 mg/mL, as determined by absorbance at 280 nm, and visually inspected for impurities by SDS-PAGE. The homogeneity of samples to be injected was usually >90%. 100 uL were injected onto the SEC column. The protein separation on SEC was performed at 0.5 mL/min for 45 minutes. PBS (phosphate buffered saline ±10% EtOH) was used as mobile phase. The ASTRA software (Wyatt Inc; CA; USA) integrated the signals of all three detectors and allowed for the determination of the molar masses in kDa of proteins from ‘first physical principles’. Self-association of proteins could reliably be determined as shown by orthogonal methods (i.e. AUC) for some characteristic dAbs. Inter-run variations and data quality was assessed by running a positive control of known in-solution state with every sample batch. For some DOM10-53 clones no reliable solution state could be assigned because the molecules bound a specifically to the column matrix or could not be resolved using the size exclusion column. For those cases when the solution state was reliable (i.e. DOM10-53 (SEQ ID NO:651), DOM10-53-531 (SEQ ID NO:2097), and DOM10-53-612 (SEQ ID NO:2044)) it was shown that the DOM10-53 (SEQ ID NO:651) molecule is mostly a monomer in solution.

### DSC (Differential Scanning Calorimetry)

[0430] Proteins were dialysed overnight into PBS buffer (phosphate buffered saline), diluted and filtered to yield a concentration of 0.5 mg/ml in PBS, as determined by absorbance at 280 nm. PBS buffer was used as a reference for all samples. DSC was performed using capillary cell microcalorimeter VP-DSC (Microcal, Mass., USA), at a heating rate of 180° C./hour. A typical scan usually was from 25-90° C. for both the reference buffer and the protein sample. After each reference buffer and sample pair, the capillary cell was cleaned with a solution of 1% Decon in water followed by PBS. Resulting data traces were analysed using Origin 7 Microcal software. The DSC trace obtained from the reference buffer was subtracted from the sample trace. The precise molar concentration of the sample was entered into the data analysis routine to yield values for appTm, enthalpy (ΔH) and van't Hoff enthalpy (ΔHv) values. Data usually were fitted to a non-2-state model. The DSC experiments showed that some DOM10-53 molecules (e.g. 10-53-472 (SEQ ID NO:2103) and 10-53-474 (SEQ ID NO:2105)) have higher melting temperatures compared to others (e.g. 10-53-344 and 10-53-434), whilst they maintain their potency. Such properties are indicative of increased stability and are useful for pulmonary delivery.

TABLE 16

| | | | | Potency IC50 | |
|---|---|---|---|---|---|
| Molecule | Tm (° C.) | Mw | SEC MALLS | (pM) | |
| 10-53-344 | 52.6/54.2 | — | n.d. | 100 | |
| 10-53-434 | 53.4 | 17 kDa/27 kDa | Monomer/ | 290 | |
| | | | dimer | | |
| 10-53-531 | 62.7 | 15.5 kDa | Monomer | 340 | |
| 10-53 | 62.7 | | Monomer | 100 | nM |
| 10-53-612 | 63.6 | | Monomer | 20 | nM |
| 10-53-472 | 57.4 | | n.d. | 54 | |
| 10-53-474 | 57.5 | | n.d. | n.d. | |
| 10-53-475 | 55.3 | | n.d. | 46 | |

### Determination of the Pharmacokinetics of an Anti-IL-13 dAb Delivered Via the Pulmonary Route of Administration.

### Test Substance

[0431] DOM10-53-613 (SEQ ID NO:2022) binds human IL-13, but not murine IL-13. DOM10-53-613 (at 1.2 mg/ml) with an HA tag for detection was diluted in 20 mM sodium citrate pH6.0, 100 mM NaCl. It was warmed from its storage temperature to 37° C. prior to administration. DOM10-53-613 (at 1.2 mg/ml) was administered to 8 week old male BALB/c mice. Animals were lightly anaesthetised and 50 μl of the relevant dAb solution or vehicle dropped gently onto the nares. The animals were held in an upright position for a few seconds while spontaneously breathing in the solution before being allowed to recover and returned to their home cage. Thereafter mice were killed at the following time points at 10 minutes, 1 hour, 2 hours, 4 hours, 8 hours and 16 hours. Serum, lung gavage and lung homogenate were collected from each mouse at each time point. Three mice were sampled at each time point

ELISA to Detect HA Tagged dAbs

[0432] A 96-well Maxisorp (Nunc) assay plate was coated overnight at 4° C. with 100 μl per well of goat polyclonal anti HA tag antibody (Abcam) at 2 μg/ml in carbonate buffer. Wells were washed 3 times with 0.05% tween/PBS and 3 times with PBS. 200 μl per well of 2% BSA in PBS was added to block the plate. Wells were washed and then 100 μl of HA tagged dAb standard or sample was added. Wells were washed and then 100 μl Protein A—HRP (1:5000 dilution; Amersham) was added to each well. Plates were developed with 100 μl of SureBlue 1-Component TMB MicroWell Peroxidase (KPL, Gaithersburg, USA) solution added to each well, and the plate was left at room temperature until a suitable signal had developed. The reaction was stopped by the addition of HCl and the absorbance was read at 450 nm. Data was plotted in GraphPad and then fitted in WinNonLin using a non-compartmental model.

### Results

[0433] The DOM10-53-613 (SEQ ID NO:2022) levels in the BAL show that the dAbs were delivered efficiently into the lung lumen. A maximum level of 19 μg/ml (˜7 μg in 0.4 ml) can be detected in the BAL at 1 hr. This means that at least 12% (7 μg of 60 μg total delivered) of the delivered dose was delivered in the lung lumen. It is likely that not all material can be recovered using the lavage procedure and this value is an underestimate. The levels in the BAL are maximal at 1 hour and dAbs are cleared with t_{1/2} of 4.4 hrs, resulting in greater than 10-fold reduced concentrations at 16 hours.

[0434] DOM10-53-613 (SEQ ID NO:2022) levels in the lung show maximum levels at 2 hours of 3.4 μg/ml. This means that approximately 5-6% of the delivered dose was present in the lung tissue. The decline of levels in the lung shows a similar pattern as for the BAL. There was a maximum level at 10 minutes followed by a clearance rate with t_{1/2} of approximately 4.7 hours, resulting in greater than 10-fold reduced concentrations at 16 hours.

[0435] DOM10-53-613 (SEQ ID NO:2022) serum levels were detected. Serum levels were at a maximum at 4 hours. At 4 hours a maximum level of 0.73 μg/ml was detected in the serum. This means that ˜1% (0.7 μg of 60 μg delivered) of the delivered material can be detected in the serum.

TABLE 17

| | BAL | LUNG | SERUM |
|---|---|---|---|
| T ½ (hr) | 4.4 | 4.7 | 3.5 |
| AUC0-∞ (μg * hr/mL) | 103.2 | 29.7 | 6.6 |
| Clearance (mL/hr/kg) | 29.1 | 101.1 | 455.5 |
| C Max (μg/mL) | 19.0 | 3.4 | 0.7 |
| T Max (hr) | 1 | 0.167 | 4 |

### Example 4

### Ligands that Bind IL-4 and IL-13

### A. Fusion Proteins

### Cloning and Production of Anti-IL-4 and Anti-IL-13 Dual Specificity Dimer

[0436] Nucleic acids encoding the anti-IL-4 dAb DOM9-112 and anti-IL-13 dAb DOM10-53-343 (SEQ ID NO:891) were cloned into a construct that encoded an in-line fusion protein with a C-terminal cysteine. The amino acid sequence AST was present between the two dAbs, this sequence is the natural CH sequence present in natural antibodies. The construct was cloned in the Pichia pastoris vector pPICZα (Invitrogen). Electrocompetent cells (X-33 or KM71H) were transformed with the construct and transformants were selected on 100 μg/ml Zeocin. 500 ml cultures were grown on BMGY media at 30° C., 250 rpm for 24 hrs until the OD₆₀₀ had reached ˜15-20. The cells were then spun down and resuspended in BMMY media (containing 0.5% (v/v) methanol) to induce protein expression. The cultures were maintained at 30° C. with shaking at 250 rpm. At 24 hour intervals the cultures were fed with the following incremental increase in the methanol concentration; 1%, 1.5% and 2% (v/v) using a 50% methanol solution. The cultures were then harvested by centrifugation and the supernatant containing the expressed protein stored at 4° C. until required. The protein was purified from the supernatant using PrA streamline using the standard purification protocol.

[0437] The PrA purified protein was found to contain both dimer and monomer species. Therefore chromatofocusing was used to separate the two proteins. A Mono P 5/20 column was used (GE Healthcare) for the separation, using a pH gradient of 6 to 4. The poly-buffers used were as described by the manufacturer to make the 6 to 4 pH range. The sample was applied at pH6 and the pH gradient generated by using 100% buffer B over 35 column volumes run at 1 ml/min. Dimer containing fractions were identified using SDS-PAGE and pooled for PEGylation.

[0438] The protein was then PEGylated using 40K PEG2-MAL using the method outlined above. This material was purified using anion exchange chromatography up to a purity >95%. The potency of the resulting dual specific ligand (PEGylated DOM9-112 (AST) DOM10-53-344) was determined in an IL-4 RBA (FIG. 16A) and an IL-13 RBA (FIG. 16B). The potency of the anti-IL-4 arm of the dual specific ligand (13 nM) was slightly reduced compared with the potency of the dAb DOM9-112 monomer (3.5 nM), whereas the potency of the anti-IL-13 arm was maintained (310 pM for the dual specific ligand vs 230 M for the dAb monomer).

[0439] The anti-IL-4 and anti-IL-13 dAbs DOM9-112 (SEQ ID NO:25) and DOM10-53-344 (SEQ ID NO:892) were also cloned as an in-line fusion with the amino acid sequence ASTKGPS (SEQ ID NO:1803) present between the two dAbs, this sequence is the start of the CH sequence present in natural antibodies. The potency of the resulting purified dual specific ligand (DOM9-112 (ASTKGPS) DOM10-53-344) was determined in an IL-4 RBA (FIG. 17A) and an IL-13 sandwich ELISA (FIG. 17B). The potency of the anti-IL-4 arm was maintained (˜1 nM) whereas the potency of the anti-IL-13 arm was only slightly reduced compared with the dAb monomer (40 pM for the dAb monomer vs 120 pM for the dual specific ligand).

### Additional Dual Targeting In-Line Fusions for IL-4 and IL-13.

[0440] To further understand the behaviour of dual targeting in-line fusions of IL4 and IL13 binding dAbs, a series of new in-line fusions and in-line fusion libraries were constructed. The DOM10-53 lineage was affinity matured using phage display using libraries diversifying triplet residues of FR1, CDR1, CDR2 and CDR3. The libraries were cloned in a phage vector and displayed as fusion protein to the gene3 protein as an (dAb1 linker dAb2) in-line fusion with dAb1 being DOM9-112-210 (SEQ ID NO:2401), the linker being amino acid residues ASTKGPS (SEQ ID NO:1803) and dAb2 being the DOM10-53 library. The selection method, subcloning and expression in E coli and screening method were essentially performed as described above, except that in-line fusion constructs were used instead of single dAbs. Outputs were cloned into vector pDOM5 and expression supernatants were screened for improved expression by binding to a protein A coated Biacore chip.

[0441] In-line fusions with improved expression levels were expressed, purified and tested in a IL-13 sandwich ELISA and cell assay. A number of variants were selected (including DOM9-112-210-ASTKGPS-DOM10-53-566). The most potent clones were DOM10-53-531 (SEQ ID NO:2097) and DOM10-53-546 (SEQ ID NO:2110) (see Table 18). Different protein preparations were made from these clones and these were tested in the IL-4 RBA and IL-13 sandwich assay as described above.

TABLE 18

| | Expression level | IL-13 Sanwich | IL-4 RBA |
|---|---|---|---|
| Clone name | (mg/l) | ELISA (EC50 nM) | (IC50 nM) |
| DOM9-112-210- | | | |
| DOM10-53-531 | | | |
| Prep 1 | 9.3 | 1.1/1.9 | 3.5/4.8 |
| Prep 2 | 11.5 | 4.9 | n.d. |
| Prep 3 | 4.5 | 2/2.8 | 13.9 |
| Prep 4 | 10 | 1 | 5.4 |
| DOM9-112-210- | | | |
| DOM10-53-546 | | | |
| Prep 1 | 2.2 | 0.62/0.77 | 4.3 |
| Prep 2 | 7.7 | 1 | 6 |

[0442] Further in-line fusions were constructed by SOE PCR of the DNA fragments encoding a dAb linker which is either ASTKGPS (SEQ ID NO:1803), if the first dAb was a Vh, or TVAAPS (SEQ ID NO:2459) if the first dAb was a Vk. This PCR product was digested with SalI/NotI and ligated in the E. coli expression vector pDOM5. After transformation to MACH1 (Invitrogen) cells, the clones were sequence verified and the in-line fusions were expressed. Expression was done by growing E. coli in 2TY supplemented with Onex media (Novagen) for 2 nights at 30° C., the cells were centrifuged and the supernatant was incubated with either Protein-L or Protein-A resin. After elution from the resin, the quality and quantity of produced in-line fusion product was verified on SDS-PAGE. The vast majority of product formed had the molecular mass of an in-line fusion with only limited free monomer. Therefore, no additional purification steps were required and the material could be tested directly.

[0443] Using the above described method the following IL-4/IL-13 in-line fusions were expressed, purified and characterised:

### DOM9-112-210-ASTKGPS-DOM10-208

### DOM9-112-210-ASTKGPS-DOM10-212

### DOM9-112-210-ASTKGPS-DOM10-213

### DOM9-112-210-ASTKGPS-DOM10-215

### DOM9-112-210-ASTKGPS-DOM10-224

### DOM9-112-20-ASTKGPS-DOM10-270

### DOM9-112-210-ASTKGPS-DOM10-416

### DOM9-112-210-ASTKGPS-DOM10-236

### DOM9-112-210-ASTKGPS-DOM10-273

### DOM9-112-210-ASTKGPS-DOM10-275

### DOM9-112-210-ASTKGPS-DOM10-276

### DOM9-112-210-ASTKGPS-DOM10-277

### DOM10-208-TVAAPS-DOM9-155-78

### DOM10-212-TVAAPS-DOM9-155-78

### DOM10-213-TVAAPS-DOM9-155-78

### DOM10-215-TVAAPS-DOM9-155-78

### DOM10-224-TVAAPS-DOM9-155-78

### DOM10-270-TVAAPS-DOM9-155-78

### DOM10-416-ASTKGPS-DOM9-155-78

### DOM10-236-ASTKGPS-DOM9-155-78

### DOM10-273-ASTKGPS-DOM9-155-78

### DOM10-275-ASTKGPS-DOM9-155-78

### DOM10-276-ASTKGPS-DOM9-155-78

### DOM10-277-ASTKGPS-DOM9-155-78

[0444] Once purified, the expression levels were determined (mg/l) and the activities were tested in an RBA for IL-4 binding and in a sandwich ELISA for IL-13 binding. The table below (Table 19) summarises the data for these in-line fusions:

TABLE 19

| | | | | | Dom10 | DOM9 |
|---|---|---|---|---|---|---|
| | Expression | | | IL-13 | RBA | RBA (IC50 |
| clone name | mg/ml | | | Biacore | (EC50 nM) | nM) |
| DOM9-112-210-DOM10-208 | 0.3 | 19.2 | 37.4 | ✓ | — | 2.48 |
| DOM9-112-210-DOM10-212 | 3.7 | | 6.3 | ✓ | 999.9 | 3.21 |
| DOM9-112-210-DOM10-213 | 5.6 | 0.2 | 4.9 | ✓ | 1152 | 4.29 |
| DOM9-112-210-DOM10-215 | 0.1 | 8.8 | 2.2 | ✓ | — | 14.19 |
| DOM9-112-210-DOM10-224 | 4.6 | | 13.4 | ✓ | 4575 | 2.75 |
| DOM9-112-210-DOM10-270 | 3.7 | | 2.7 | ✓ | 397.5 | 2.79 |
| DOM9-112-210-DOM10-416 | 6.9 | | 0.0 | ✓ | 34420 | 7.27 |
| DOM9-112-210-DOM10-236 | 0.2 | 0.1 | 2.2 | ✓ | — | >20 |
| DOM9-112-210-DOM10-273 | 1.2 | | 0.3 | ✓ | 4553 | 10.51 |
| DOM9-112-210-DOM10-275 | 4.9 | 0.2 | 0.0 | ✓ | — | 10.89 |
| DOM9-112-210-DOM10-276 | 6.9 | | 0.1 | ✓ | — | 10.20 |
| DOM9-112-210-DOM10-277 | 1.3 | 3.7 | 0.2 | ✓ | 4385 | 11.74 |
| DOM10-208-DOM9-155-78 | | | 41.0 | ✓ | 4243 | 8.18 |
| DOM10-212-DOM9-155-78 | | | 0.5 | ✓ | — | >20 |
| DOM10-213-DOM9-155-78 | | | 16.9 | ✓ | 62.04 | 6.91 |
| DOM10-215-DOM9-155-78 | | | 22.6 | ✓ | 10.82 | 6.65 |
| DOM10-224-DOM9-155-78 | | | 3.6 | ✓ | — | 12.49 |
| DOM10-270-DOM9-155-78 | | | 2.9 | ✓ | 37.23 | 8.60 |
| DOM10-416-DOM9-155-78 | | 1.1 | 26.3 | ✓ | 443.7 | 5.88 |
| DOM10-236-DOM9-155-78 | | 3.6 | 10.8 | ✓ | 372 | 2.54 |
| DOM10-273-DOM9-155-78 | | 6.4 | 16.2 | ✓ | 185.2 | 2.25 |
| DOM10-275-DOM9-155-78 | | 0.2 | 0.0 | — | — | — |
| DOM10-276-DOM9-155-78 | | 0.2 | 20.0 | ✓ | — | 5.02 |
| DOM10-277-DOM9-155-78 | | 1.1 | 1.3 | ✓ | 648 | 9.45 |
| | | | | | DOM9-112 | 3.60 |
| | | | | | DOM9- | 0.41 |
| | | | | | 155-78 | |

[0445] Furthermore, an affinity matured variant of DOM10-275 (SEQ ID NO:2196), i.e. DOM10-275-1 (SEQ ID NO:2241), was specifically chosen to be paired with both DOM9-112-210 (SEQ ID NO:2434) and DOM9-155-78 (SEQ ID NO:2427). These in-line fusions were constructed and expressed as described above. In addition to testing in the mentioned IL-4 RBA and IL-13 sandwich ELISA, these in-line fusions were also tested for functionality in a TF-1 cell proliferation assay. In these assays the dAb was preincubated with a fixed amount of either IL-4 or IL-13, this mixture was added to the TF-1 cells and the cells were incubated for 72 hours. After this incubation, the level of cell proliferation was determined. The results of this assay are summarised below (Table 20) and demonstrate that both arms of the in-line fusion were active in the cell assay.

TABLE 20

| | | | Il-4 cell | IL-13 cell |
|---|---|---|---|---|
| | DOM9 RBA | DOM10 RBA | assay | assay |
| Sample | IC50 (nM) | IC50 (nM) | IC50 (nM) | IC50 (nM) |
| DOM9-112-210 | 0.391 | — | | |
| DOM9-155-78 | 0.456 | — | | |
| DOM10-275-1- | 6.238 | 39.17 | 5.1-7.6 | 31-46 |
| DOM9-155-78 | | | | |
| DOM9-112-210- | 4.189 | 44.88 | 6.8-10.2 | 27-40 |
| DOM10-275-1 | | | | |
| DOM10-275-1 | — | 31.30 | | |

### B. IgG-Like Formats

### Cloning, Expression as Dual Specific IgG

[0446] IgG-like formats that bound IL-4 and IL-13 were expressed using the vector pDOM30. This vector is based on the Invitrogen pBudCE4.1 backbone and has been modified to comprise a codon-optimised heavy chain cassette under control of the CMV promoter and a codon-optimised light chain cassette under control of the EF1-alpha promoter. dAbs were cloned into the heavy chain cassette using the BamHI and XhoI restriction sites, and into the light chain cassette using SalI and BsiWI restriction sites. This strategy resulted in native heavy and light chain N-termini and the following variable-constant domain junctions. IgG expression constructs were transformed into chemically competent MachI cells (Invitrogen) grown on low salt LB agar supplemented with 250 μg/L zeocin. For each construct, plasmid DNA was prepared from 3 or 4 randomly picked colonies and dAb sequences were verified using the primers CMV-F (CGCAAATGGGCGGTAGGCGTG) (SEQ ID NO:1795) and pIG(EF1-alpha) (TGAGTGGGTGGAGACTG) (SEQ ID NO:1796). Endotoxin-free plasmid DNA was prepared from 500 mL overnight cultures using the Qiagen endo-free Megaprep kit for verified clones.

[0447] The specificity of the anti-IL-4 and anti-IL-13 specific IgG-like format was assessed in IL-4 receptor RBA, and the IL-13 sandwich ELISA. FIG. 18 shows that the potency of the anti-IL-4 dAb monomer DOM9-44-502 (SEQ ID NO:361) was 3-4 fold reduced when formatted in the IgG-like format (4 nM for the dAb monomer vs. 13 nM for the IgG-like format), whereas the potency of the anti-IL-13 dAb DOM10-176-535 (SEQ ID NO:1362) was 1 nM for both the dAb monomer and the IgG-like format.

Determination of the Pharmacokinetics of [³H]-PEGylated Anti-IL13 dAbs and anti-IL-4 and anti-IL13 in-line fusions
Radiolabelling of PEGylated Anti-IL13 dAbs and Anti-IL-4 and Anti-IL13 In-Line Fusions.

[0448] Anti-IL13 dAbs and anti-IL-4 and anti-IL13 in-line fusions were expressed and PEGylated using the N-terminus (α-amino group) or C-terminus using a 40K branched PEG as described above. The protein was radiolabelled with tritium using N-Succinimidyl[2,3-³H]propionate (NSP) in hexane:ethyl acetate (9:1). 400 μL of NSP was dispensed into a vial and the solvent was removed under a gentle stream of nitrogen at ≦30° C. The residue was then re-suspended in 100 μL of DMSO. 2.5 mL of DOM0910 40K branched PEG was then added to the NSP/DMSO and the mixture was incubated for 60 minutes at room temperature. Following incubation, the solution was loaded onto a PD10 column that was pre-equilibrated with 25 mL of phosphate buffered saline (PBS) and the eluate was discarded. Radiolabelled protein was then eluted off the PD10 column using 3.5 mL of PBS and the eluate was collected. The specific activity of the material was determined (assuming a 100% labelling efficiency and recovery of protein from the PD10 column) and the solution was used immediately or stored at approximately 4° C. until required.

### Animal Work.

[0449] For each molecule, 3 female Spargue-Dawley rats received a single intravenous dose at 1 mg/kg. Serial blood samples were then collected from the tail vein after 2 minutes, 2 hours, 8 hours, 24 hours, 48 hours, 72 hours and 96 hours. The final blood sample was collected after 120 hours immediately prior to sacrifice by cardiac puncture under anaesthetic.

[0450] To obtain serum, blood samples were collected and allowed to clot. Once clotted, samples were centrifuged at 300 rpm for 10 mins. Serum was then harvested and stored at −20° C. until analysis.

### Determination of Radioactivity.

[0451] The radioactive content of each sample was determined by liquid scintillation counting with automatic quench correction. Serum samples were mixed with PBS prior to addition of scintillation fluid. Disintegration rates from appropriate blank sample vials were subtracted from sample disintegration rates to give net dpm for each sample. Gross radioactivity below twice background level was considered to be below the limit of reliable measurement.

[0452] Additional weighed aliquots of serum obtained after 2 minutes and 48 and 120 hours post dose were lyophilised prior to determination of radioactivity concentration to determine any contribution to total counts from free tritium.

[0453] Data have been fitted using Winonlin fitting software and terminal half life values are determined and described in Table 21. DOM9-112-210 ASTKGPS DOM10-53-612 with N-terminal 40K Branched PEG has a terminal half life of 41 hrs. whereas DOM9-112-210 ASTKGPS DOM10-53-612 with C-terminal 40K Branched PEG has an half life of 32 hrs.

TABLE 21

| | Animal | Animal | Animal | Mean |
|---|---|---|---|---|
| Molecule | #1 | #2 | #3 | (hrs) |
| DOM9-112-210 ASTKGPS DOM10- | 32.25 | 32.51 | 32.01 | 32.26 |
| 53-612 C-term 40K Branched PEG | | | | |
| DOM9-112-210 ASTKGPS DOM10- | 38.37 | 44.32 | 41.38 | 41.36 |
| 53-612 N-term 40K Branched PEG | | | | |
| DOM10-53-612 N-term 40K | 46.06 | 31.39 | 54.35 | 43.93 |
| Branched PEG | | | | |
| DOM10-53-612 C-term 40K | 46.58 | 46.57 | 41.45 | 44.87 |
| Branched PEG | | | | |

### Example 5

### Additional Ligands that Bind IL-13

[0454] Potencies of Anti-IL-13 dAbs DOM10-53-474 and DOM10-275-78 HEK Cell Assay

[0455] This assay uses HEK293 cells stably transfected with the STAT6 gene and the SEAP (secreted embryonic alkaline phosphatase) reporter gene (Invivogen, San Diego). Upon stimulation with IL-13 SEAP is secreted into the supernatant which is measured using a colorimetric method. Soluble dAbs were tested for their ability to block IL-13 signalling via the STAT6 pathway. Briefly, the dAb is pre-incubated with 6 ng/ml recombinant IL-13 (GSK) for one hour then added to 50000 HEKSTAT6 cells in DMEM (Gibco, Invitrogen Ltd, Paisley, UK) in a tissue culture microtitre plate. The plate is incubated for 24 hours at 37° C. 5% CO₂. The culture supernatant is then mixed with QuantiBlue (Invivogen) and the absorbance read at 640 nm. Anti-IL-13 dAb activity causes a decrease in STAT6 activation and a corresponding decrease in A₆₄₀ compared to IL-13 stimulation. (FIG. 23)

TABLE 22

| | 10-53-474 | 10-275-78 | 10-275-94 | 10-275-99 | 10-275- | 10-275- |
|---|---|---|---|---|---|---|
| | EC50 | EC50 | EC50 | EC50 | 100 EC50 | 101 EC50 |
| | (nM) | (nM) | (nM) | (nM) | (nM) | (nM) |
| HEK assay | 0.63 (n = 13) | 2.5 (n = 7) | 2.3 | 2.8 | 2.8 | 3.6, 2.0 |
| hIL-13 | | | | | | |
| HEK assay | 11.1 (n = 10) | 1.4 (n = 7) | 2.0 | 2.0 | 2.5 | 1.8 |
| cIL-13 | | | | | | |

### Sandwich ELISA

### IL-13 Sandwich ELISA

[0456] A MAXISORP™ plate (high protein binding ELISA plate, Nunc, Denmark) was coated overnight with 2.5 μg/ml coating antibody (Module Set, Bender MedSystems, Vienna, Austria), then washed once with 0.05% (v/v) Tween 20 in PBS before blocking with 0.5% (w/v) BSA 0.05% (v/v) Tween 20 in PBS. The plates were washed again before the addition of 25 pg/ml IL-13 (Bender MedSystems) mixed with a dilution series of DOM10 dAb (i.e., an anti-IL-13 dAb) or IL-13. The plates were washed again before binding of IL-13 to the capture antibody was detected using biotin conjugated detection antibody (Module Set, Bender Medsystems), followed by peroxidase labelled Streptavidin (Module Set, Bender MedSystems). The plate was then incubated with TMB substrate (KPL, Gaithersburg, USA), and the reaction was stopped by the addition of HCl and the absorbance read at 450 nm. Anti-IL-13 dAb activity caused a decrease in IL-13 binding and therefore a decrease in absorbance compared with the IL-13 only control. Table 23 shows the results of the ELISA.

TABLE 23

| | 10-53-474 (EC₅₀) |
|---|---|
| IL-13 | 0.023 nM (n = 23) |

### BIACORE® Off-Rate Screening

[0457] A streptavidin coated SA chip (Biacore) was coated with approximately 100 RU of biotinylated human IL-13 (R&D Systems, Minneapolis, USA) or cynomolgous IL-13 (Produced in-house). dAbs were serially diluted in HBS-EP running buffer. 50 to 100 ul of the diluted supernatant was injected (kininject) at 50 ul/min flow rate, followed by a 5 minute dissociation phase. Association and dissociation off-rates and constants were calculated using BIAevaluation software v4.1 (Biacore). Table 24 shows the KD (K_{off}/Kₒₙ).

TABLE 24

| | DOM10-53-474 | DOM10-275-78 |
|---|---|---|
| | (nM) | (nM) |
| Biacore hIL-13 | 0.028 | 0.072-0.1 |
| Biacore cIL-13 | 2.0 | 0.32-0.75 |

### Binding to Variant IL-13 (R130Q)

[0458] Genetic variants of IL-13, of which R130Q is a common variant, have been associated with an increased risk for asthma (Heinzmann et al. Hum Mol Genet. (2000) 9549-59) and bronchial hyperresponsiveness (Howard et al., Am. J. Resp. Cell Molec. Biol. (2001) 377-384). Therefore it is desirable for the anti-IL-13 dAb to also have binding affinity for this variant of the cytokine. DOM10-53-474 bound IL-13 (R130Q) and inhibited IL-13 (R130Q) stimulated proliferation in two cell assays (TF-1 & Hek-Stat6).

TABLE 25
(DOM10-53-474)

| Cell Assay | EC50 nM |
|---|---|
| Hek-Stat6 (variant hIL-13 stimulation = | 0.273 (n = 4) |
| 3 ng/ml) | |
| TF-1 (variant hIL-13 stimulation = | 0.133 (n = 3) |
| 5 ng/ml) | |

### Agonistic Activity

[0459] To determine whether DOM10-53-474 binds non-target proteins, and to ensure that no undesired cytokines/interferons are released due to agonistic activity of the dAb, DOM10-53-474 was tested for agonistic activity in a human blood assay. Each sample was titrated from 1 μM to 10 nM of DOM10-53-474 and tested in two donors, A & B. The assay was set up in duplicate (a & b) and the meso scale discovery (MSD) was performed in duplicate. The nil wells contained blood alone, (i.e. no dAb added), there were 8 nil wells for donor A and 4 for donor B. The cytokines assayed were IL-8, IL-6, TNFα, IL-10, IL-1β, IL-12p70 and IFNγ. No agonistic activity was seen with respect to IL-6, TNFα, IL-10, IL-1β, IL-12p70 or IFNγ. There was a little IL-8 production at the 1 μM concentration but this was very low.

### SEC-MALLS

[0460] The in-solution properties of dAb proteins were determined by an initial separation on SEC (size exclusion chromatography; TSKgel G2000/3000SWXL, Tosoh Biosciences, Germany; BioSep-SEC-S2000/3000, Phenomenex, Calif., USA) and subsequent on-line detection of eluting proteinaceous material by UV (Abs280 nm), R1 (refractive index) and light scattering (laser at 685 nm). The proteins were at an initial concentration of 2 mg/mL for DOM10-275-78 and 1.4 mg/ml for DOM10-53-474, as determined by absorbance at 280 nm, and visually inspected for impurities by SDS-PAGE. The homogeneity of samples to be injected was usually >90%. 100 uL were injected onto the SEC column. The protein separation on SEC was performed at 0.5 mL/min for 45 minutes. PBS (phosphate buffered saline ±10% EtOH) was used as mobile phase. The ASTRA software (Wyatt Inc; CA; USA) integrated the signals of all three detectors and allowed for the determination of the molar masses in kDa of proteins from ‘first physical principles’. Inter-run variations and data quality was assessed by running a positive control of known in-solution state with every sample batch.

[0461] For some DOM10-53 clones no reliable solution state could be assigned because the molecules bound aspecifically to the column matrix or could not be resolved using the size exclusion column. For these cases where the solution state was reliable (i.e. DOM10-53-474 and DOM10-275-78) it was shown that the DOM10-275-78 molecule is mostly a monomer in solution and 90% is eluted from the column (FIG. 24), and that for the DOM10-53-474 molecule the majority of the protein is clear monomer (FIG. 25). DOM10-53-474 eluted as a single peak with the molar mass defined as 13 kDa in the right part of the peak (monomer) but creeping up over the left part of the peak up to 18 kDa, indicating some degree of rapid self association (average mass shown in the table is 14 kDa).

### DSC

[0462] DOM10-275-78 protein was supplied in both PBS buffer (phosphate buffered saline) filtered to yield a concentration of 2 mg/ml, and in 50 mM potassium phosphate buffer pH7.4 at 2 mg/ml. Concentrations were determined by absorbance at 280 nm. PBS buffer and potassium phosphate buffer were used as a reference for the respective samples. DSC was performed using capillary cell microcalorimeter VP-DSC (Microcal, Mass., USA), at a heating rate of 180° C./hour. A typical scan usually was from 25-90° C. for both the reference buffer and the protein sample. After each reference buffer and sample pair, the capillary cell was cleaned with a solution of 1% Decon in water followed by PBS. Resulting data traces were analysed using Origin 7 Microcal software. The DSC trace obtained from the reference buffer was subtracted from the sample trace. The resultant traces are shown in FIGS. 26 AND 27. The precise molar concentration of the sample was entered into the data analysis routine to yield values for apparent Tm, enthalpy (ΔH) and van't Hoff enthalpy (ΔHv) values. Typically data were fitted to a non-2-state model. The DSC experiments showed that some DOM10 molecules (e.g. 10-53-474 (SEQ ID NO:2105), FIG. 28, have higher melting temperatures compared to others (e.g. 10-275-78). Such properties are indicative of increased stability and indicate superior suitability, for example, for pulmonary delivery.

TABLE 26

| Molecule | Apparent Tm (° C.) |
|---|---|
| DOM10-275-78 in PBS | 49.4 |
| DOM10-275-78 in | 49.8 |
| potassium phosphate | |
| DOM10-53-474 in PBS | 54.0 |

[0463] The unfolding of DOM10-53-474 protein is irreversible, and therefore apparent Tm might be lower than the melting temperature due to some irreversible steps in the unfolding mechanism taking place before the melting point.

### Solubility

[0464] Liquid formulations that contain high dAb concentrations are desirable for certain purposes. For example, proteins delivered therapeutically via a nebulising device may need to be at higher concentrations than would be expected for systemic delivery because not all the nebulised protein will be inhaled nor deposited in the lung. Volumes administered are also limited by the size of the reservoir in the nebuliser of interest. To this end, the solubility of both DOM10-53-474 and DOM10-275-78 was measured to determine the maximum concentration that could be achieved before incurring protein losses through aggregation and precipitation.

[0465] The proteins of a known starting concentration in PBS, determined by measuring absorbance at 280 nm, and of a known volume were each applied to a Vivaspin 20 centrifugal concentrating device, with a PES membrane of MWCO 3,000 Da (Vivasciences) and spun in a benchtop centrifuge at 4,000 g for time intervals of between 10 and 30 mins. Ten minute time periods were used initially and these were incremented as the protein became more concentrated in order to obtain the desired reduction in volume.

[0466] After each spin the protein was removed from the device, the volume measured to the nearest 50 μl using pipettes and the concentration determined. Concentration determination was performed using the absorbance reading obtained by subtracting the absorbance measured at 320 nm from the absorbance measured at 280 nm after the sample had been centrifuged at 16,000 g to remove any precipitate.

[0467] The experimental concentration was plotted against the theoretical concentration at that volume, and the maximum solubility was taken as the point at which experimental concentration diverged from theoretical as shown in FIG. 29.

[0468] For both proteins a concentration of 100 mg/ml was achieved before divergence and actual protein recovery was approximately 100% of the start material.

### Nebulisation of DOM10-53-474

[0469] The nebulising device can nebulise the dAb solution into droplets, only some of which will fall within the requisite size range for pulmonary deposition (1-5 μm). The particle size of the aerosol particles were analysed by laser light scattering using the Malvern Spraytek. Two post-nebulisation samples were collected i) protein solution which remained in the reservoir and ii) aerosolized protein collected by condensation. The parameters measured to assess the nebulisation process were i) Respirable fraction−% of particle in 1-5 μm size range, this is important to determine how much dAb will reach the deep lung; ii) Particle size distribution (psd) of dAb; iii) Mean median aerodynamic diameter (MMAD)—average droplet size of nebulised dAb solution within psd. The stability of the dAb to the nebulisation process was assessed by comparing pre- and post nebulisation samples using a variety of methods, i) Size Exclusion Chromatography (SEC)—which demonstrates whether the nebulisation process caused aggregation of the dAb; ii) Sandwich ELISA for binding to hIL-13.

[0470] The nebulisation properties of DOM10-53-474 were investigated using both a jet nebuliser (LC+, Pari) and a vibrating mesh nebuliser (E-flow, Pari). DOM10-53-474 protein was tested in both PBS buffer (phosphate buffered saline) at a concentration of 2.6 mg/ml, and in 25 mM sodium phosphate buffer pH7.5, 7% (v/v) PEG1000, 1.2% (w/v) sucrose at 2.3 and 4.7 mg/ml. Nebulisation was performed for approximately 3 minutes. 100 uL of protein samples (diluted to 1 mg/mL) were injected onto the SEC (TSKgel G2000SWXL, Tosoh Biosciences, Germany) column. The protein separation on SEC was performed at 0.5 mL/min for 45 minutes. PBS (phosphate buffered saline)+10% EtOH was used as mobile phase. The detection of eluting proteinaceous material was carried by on-line detection by UV (Abs 280 nm & 215 nm). The SEC profile of the pre- and two post-nebulisation samples were identical; no peaks indicative of aggregation were seen post nebulisation, FIGS. 30A-B. The samples were analysed for binding to hIL-13 and the potency was shown to be unaffected by nebulisation, FIG. 31. The optimum MMAD is 3 μm and for deep lung delivery the desirable respirable fraction is the highest percentage of particles <5 μm. The LC+ (Pari) Jet nebuliser gives the better MMAD: MMAD values are lower when the buffer contains PEG; MMAD decreases as protein concentration increases. The LC+ (Pari) Jet nebuliser gives the higher %<5 μm: higher %<5 μm values are obtained when the buffer contains PEG; %<5 μm also increases as protein concentration increases.

TABLE 27

| | eFlow Rapid | | Pari LC+ | |
|---|---|---|---|---|
| | MMAD | | MMAD | |
| Formulation | (um) | % < 5 um | (um) | % < 5 um |
| 25 mM NaPhosphate pH7.5, | 4.26 | 60.6% | 3.98 | 61.2% |
| 7% PEG 1000, 1.2% Sucrose, | | | | |
| 2.3 mg/ml | | | | |
| 25 mM NaPhosphate pH7.5, | 4.10 | 63.8% | 3.66 | 66.5% |
| 7% PEG 1000, 1.2% Sucrose, | | | | |
| 4.7 mg/ml | | | | |
| 10-53-474, PBS, | 5.20 | 47.9% | 4.43 | 56.6% |
| 2.6 mg/ml | | | | |

### Downstream Processing and Purity Obtained

[0471] A traditional method for initial capture and purification of antibodies and antibody fragments from fermenter supernatants or periplasmic fractions is using Protein A immobilised on an inert matrix. As an affinity chromatography step this has the advantage of good protein recovery and high (e.g. ˜90%) level of purity. However, there are some disadvantages. As with all forms of affinity chromatography some of the ligand can be leached from the column support matrix during the elution phase, Protein A is known to be a potential immunogen. Therefore, if Protein A is used, then any residual Protein A, leached from the column, should be removed or reduced as far as possible in subsequent chromatography steps.

### DOM10-275-78 Purification

[0472] The initial capture step for either fermenter supernatants or periplasmic fraction containing DOM10-275-78 was by direct loading onto Protein A Streamline resin (GE Healthcare) equilibrated in PBS. The resin was washed with 2-5 column volumes of PBS before eluting the protein with 4 column volumes of 0.1M Glycine pH3.0. At this stage the eluted protein was approximately 99% pure, containing approximately 1% of dimeric DOM10-275-78 as measured by SEC and is shown in FIG. 32. Protein recovery was virtually 100%. Residual PrA was measured using a PrA ELISA kit (Cygnus, #F400) and was determined to be between 50 to 200 ppm.

Residual PrA removal

[0473] The residual PrA was reduced using two further chromatographic steps. The eluate from the PrA step was pH adjusted to pH6.5 using 1 M Tris pH8.0 and prepared for purification on hydroxyapatite type II by addition of 1% (v/v) 0.5M sodium phosphate pH6.5 resulting in a final phosphate concentration of 5 mM. The PrA eluate was applied to the column which had been equilibrated with 5 mM phosphate pH6.5 and the DOM10-275-78 monomer eluted in the flow through. The dimer was bound to the column and eluted at the start of a salt gradient which was applied after the DOM10-275-78 had been recovered. The gradient ran from 0 to 1M NaCl in 5 mM phosphate pH6.5 over 30 column volumes. It was expected that the PrA would elute in this gradient although amounts were too small to be able to see by absorbance on the chromatogram. Complexes of PrA with the DOM10-275-78 eluted after the salt gradient when a 500 mM phosphate pH6.5 wash was applied to the column. An example of a typical chromatogram is shown in FIG. 33. The recovery of DOM10-275-78 monomer after this stage was measured as 74% based on absorbance at 280 nm and the purity was 100% as measured by SEC which is shown in FIG. 34. The residual protein levels were measured and were found to have been reduced to between 0.4 and 0.56 ppm (parts per million i.e. ng/mg).

[0474] A further purification step was introduced to reduce the residual PrA even further. The eluate pool from the hydroxyapatite column was directly applied to a phenyl (HIC) column (GE Healthcare) after addition of NaCl to a final concentration of 2M. The column had been equilibrated with 25 mM phosphate pH7.4 plus 2M NaCl. The protein was eluted with a gradient from 2M NaCl to no salt over 20 column volumes as shown in the chromatogram in FIG. 35. After this step the residual PrA levels were reduced to between 0.15 to 0.19 ppm and the protein recovery was measured by absorbance at 280 nm as being 80%.

### Example 6

### Codon Optimization of Select Anti-IL-13 dAbs

[0475] Two anti-IL-13 dAbs were selected for codon optimization, DOM10-53-474 and DOM10-275-78. DOM10-53-474 was optimized for both E. coli expression (once) and Pichia pastoris soluble expression (twice). DOM10-275-78 was optimized once for E. coli expression.

[0476] The theoretical minimum percent identity of a codon optimised sequence to the wild-type dAb (i.e. maximising the number of nucleotide changes within each degenerate codon to still encode the same amino acid sequence) for DOM10-53-474 is 57.6% and for DOM10-53-78 is 54.6%.

[0477] The actual percent identity for DOM10-53-474 optimized for E. coli expression (SEQ ID NO:2470) was 79.0% sequence identity to wild-type DOM10-53-474. The actual percent identity for DOM10-53-474 optimized for Pichia pastoris soluble expression was 75.7% (SEQ ID NO:2471) and 75.4% (SEQ ID NO:2472).

[0478] The actual percent identity for DOM10-275-78 optimized for E. coli expression (SEQ ID NO:2473) is 75.2%.

[0479] The teachings of all patents, published applications and references cited herein are incorporated by reference in their entirety.

[0480] While this invention has been particularly shown and described with references to example embodiments thereof, it will be understood by those skilled in the art that various changes in form and details may be made therein without departing from the scope of the invention encompassed by the appended claims.

1. A ligand that has binding specificity for interleukin-4 (IL-4) and interleukin-13 (IL-13) comprising
a protein moiety that has a binding site with binding specificity for IL-4; and
a protein moiety that has a binding site with binding specificity for IL-13,
with the proviso that said protein moiety that has a binding site with binding specificity for IL-4 is not an IL-4 receptor or IL-4-binding portion thereof, and said protein moiety that has a binding site with binding specificity for IL-13 inhibits the binding of an anti-IL-13 domain antibody (dAb) selected from the group consisting of DOM10-275-78 (SEQ ID NO:2456), DOM10-275-94 (SEQ ID NO:2457), DOM10-275-99 (SEQ ID NO:2458), DOM10-275-100 (SEQ ID NO:2459) and DOM10-275-101 (SEQ ID NO:2460) to IL-13.

2. The ligand of claim 1, wherein said protein moiety that has a binding site with binding specificity for IL-4 inhibits the binding of IL-4Rα, an IL-4-binding portion of IL-4Rα or an anti-IL-4 domain antibody (dAb) selected from the group consisting of DOM9-44-502 (SEQ ID NO:512), DOM9-155-5 (SEQ ID NO:605), DOM9-155-25 (SEQ ID NO:617), DOM9-112-155 (SEQ ID NO:292), DOM9-112-168 (SEQ ID NO:305), DOM9-112-174 (SEQ ID NO:311), DOM9-112-199 (SEQ ID NO:336), DOM9-112-200 (SEQ ID NO:337), DOM9-155-77 (SEQ ID NO:2426), DOM9-155-78 (SEQ ID NO:2427), DOM9-112-202 (SEQ ID NO:339), DOM9-112-209 (SEQ ID NO:2433), DOM9-112-210 (SEQ ID NO:2434) and DOM9-44-502 (SEQ ID NO:512) to IL-4; and said protein moiety that has a binding site with binding specificity for IL-13 inhibits the binding of an anti-IL-13 domain antibody (dAb) selected from the group consisting of DOM10-275-78 (SEQ ID NO:2456), DOM10-275-94 (SEQ ID NO:2457), DOM10-275-99 (SEQ ID NO:2458), DOM10-275-100 (SEQ ID NO:2459) and DOM10-275-101 (SEQ ID NO:2460) to IL-13.

3. The ligand of claim 1, wherein said protein moiety that has a binding site with binding specificity for IL-4 is provided by an antibody fragment, and said protein moiety that has a binding site with binding specificity for IL-13 is provided by an antibody fragment.

4. The ligand of claim 3, wherein the antibody fragments are each an immunoglobulin single variable domain.

5-10. (canceled)

11. A ligand that has binding specificity for IL-4 and IL-13, comprising an immunoglobulin single variable domain with binding specificity for IL-4 and an immunoglobulin single variable domain with binding specificity for IL-13, wherein
said immunoglobulin single variable domain with binding specificity for IL-4 inhibits binding of an anti-IL-4 domain antibody (dAb) selected from the group consisting of DOM9-44-502 (SEQ ID NO:512), DOM9-155-5 (SEQ ID NO:605), DOM9-155-25 (SEQ ID NO:617), DOM9-112-155 (SEQ ID NO:292), DOM9-112-168 (SEQ ID NO:305), DOM9-112-174 (SEQ ID NO:311), DOM9-112-199 (SEQ ID NO:336), DOM9-112-200 (SEQ ID NO:337), DOM9-155-77 (SEQ ID NO:2426), DOM9-155-78 (SEQ ID NO:2427), DOM9-112-202 (SEQ ID NO:339), DOM9-112-209 (SEQ ID NO:2433), DOM9-112-210 (SEQ ID NO:2434) and DOM9-44-502 (SEQ ID NO:512) to IL-4; and
said immunoglobulin single variable domain with binding specificity for IL-13 inhibits binding of an anti-IL-13 domain antibody (dAb) selected from the group consisting of DOM10-275-78 (SEQ ID NO:2456), DOM10-275-94 (SEQ ID NO:2457), DOM10-275-99 (SEQ ID NO:2458), DOM10-275-100 (SEQ ID NO:2459) and DOM10-275-101 (SEQ ID NO:2460) to IL-13.

12-17. (canceled)

18. The ligand of claim 11 wherein each said immunoglobulin single variable domain with binding specificity for IL-4 binds IL-4 with an affinity (KD) that is between about 100 nM and about 1 pM, as determined by surface plasmon resonance.

19. The ligand of claim 11 wherein each said immunoglobulin single variable domain with binding specificity for IL-13 binds IL-13 with an affinity (KD) that is between about 100 nM and about 1 pM, as determined by surface plasmon resonance.

20. The ligand of claim 11 wherein said ligand binds IL-4 with an affinity (KD) that is between about 100 nM and about 1 pM, as determined by surface plasmon resonance.

21. The ligand of claim 11 wherein said ligand binds IL-13 with an affinity (KD) that is between about 100 nM and about 1 pM, as determined by surface plasmon resonance.

22. The ligand of claim 11, wherein said immunoglobulin single variable domain with binding specificity for IL-4 and said immunoglobulin single variable domain with binding specificity for IL-13 are independently selected from the group consisting of a human V_{H} and a human V_{L}.

23. The ligand of claim 11, wherein said ligand is an IgG-like format comprising two immunoglobulin single variable domains with binding specificity for IL-4, and two immunoglobulin single variable domains with binding specificity for IL-13.

24-26. (canceled)

27. A ligand that has binding specificity for IL-13, comprising an immunoglobulin single variable domain with binding specificity for IL-13, wherein said immunoglobulin single variable domain with binding specificity for IL-13 inhibits binding of an anti-IL-13 domain antibody (dAb) selected from the group consisting of DOM10-275-78 (SEQ ID NO:2456), DOM10-275-94 (SEQ ID NO:2457), DOM10-275-99 (SEQ ID NO:2458), DOM10-275-100 (SEQ ID NO:2459) and DOM10-275-101 (SEQ ID NO:2460) to IL-13.

28. (canceled)

29. The ligand of claim 27, wherein said immunoglobulin single variable domain with binding specificity for IL-13 has the epitopic specificity of a dAb selected from the group consisting of DOM10-275-78 (SEQ ID NO:2456), DOM10-275-94 (SEQ ID NO:2457), DOM10-275-99 (SEQ ID NO:2458), DOM10-275-100 (SEQ ID NO:2459) and DOM10-275-101 (SEQ ID NO:2460).

30-32. (canceled)

33. The ligand of claim 27, wherein said immunoglobulin single variable domain with binding specificity for IL-13 binds IL-13 with an affinity (KD) that is between about 100 nM and about 1 pM, as determined by surface plasmon resonance.

34. The ligand of claim 27, wherein said ligand binds IL-13 with an affinity (KD) that is between 100 nM and about 1 pM, as determined by surface plasmon resonance.

35. The ligand of claim 27, wherein said immunoglobulin single variable domain with binding specificity for IL-13 is independently selected from the group consisting of a human V_{H} and a human V_{L}.

36-38. (canceled)

39. A ligand that has binding specificity for IL-4 and IL-13, wherein said ligand is a fusion protein comprising an immunoglobulin single variable domain with binding specificity for IL-4 and an immunoglobulin single variable domain with binding specificity for IL-13, wherein
said immunoglobulin single variable domain with binding specificity for IL-4 inhibits binding of an anti-IL-4 domain antibody (dAb) selected from the group consisting of DOM9-44-502 (SEQ ID NO:512), DOM9-155-5 (SEQ ID NO:605), DOM9-155-25 (SEQ ID NO:617), DOM9-112-155 (SEQ ID NO:292), DOM9-112-168 (SEQ ID NO:305), DOM9-112-174 (SEQ ID NO:311), DOM9-112-199 (SEQ ID NO:336), DOM9-112-200 (SEQ ID NO:337), DOM9-155-77 (SEQ ID NO:2426), DOM9-155-78 (SEQ ID NO:2427), DOM9-112-202 (SEQ ID NO:339), DOM9-112-209 (SEQ ID NO:2433), DOM9-112-210 (SEQ ID NO:2434) and DOM9-44-502 (SEQ ID NO:512) to IL-4; and
said immunoglobulin single variable domain with binding specificity for IL-13 inhibits binding of an anti-IL-13 domain antibody (dAb) selected from the group consisting of DOM10-275-78 (SEQ ID NO:2456), DOM10-275-94 (SEQ ID NO:2457), DOM10-275-99 (SEQ ID NO:2458), DOM10-275-100 (SEQ ID NO:2459) and DOM10-275-101 (SEQ ID NO:2460) to IL-13.

40-58. (canceled)

59. The ligand of claim 1, wherein said ligand further comprises a half-life extending moiety.

60-73. (canceled)

74. A method for treating an allergic disease comprising administering to a subject in need thereof a therapeutically effective amount of ligand of claim 1.

75. A method for inhibiting a Th2-type immune response comprising administering to a subject in need thereof a therapeutically effective amount of ligand of claim 1.

76. A method for treating asthma comprising administering to a subject in need thereof a therapeutically effective amount of ligand of claim 1.

77. A method for treating cancer comprising administering to a subject in need thereof a therapeutically effective amount of claim 1.

78. (canceled)

79. A method of administering to a subject anti-IL-4 treatment and anti-IL-13 treatment, the method comprising simultaneous administration of an anti-IL-4 treatment and an anti-IL-13 treatment by administering to said subject a therapeutically effective amount of a ligand of claim 1.

80. A pharmaceutical composition comprising a ligand of claim 1 and a physiologically acceptable carrier.

81-82. (canceled)

83. A drug delivery device comprising the pharmaceutical composition of claim 80.

84-86. (canceled)

87. An isolated or recombinant nucleic acid encoding a ligand of claim 1.

88. A vector comprising the recombinant nucleic acid of claim 87.

89. A host cell comprising the recombinant nucleic acid of claim 87 or the vector of claim 88.

90. A method for producing a ligand comprising maintaining a host cell of claim 89 under conditions suitable for expression of said nucleic acid or vector, whereby a ligand is produced.

91. The method of claim 90, further comprising isolating the ligand.

92. A method of inhibiting proliferation of peripheral blood mononuclear cells (PBMC) in an allergen-sensitized subject, comprising administering to the subject a pharmaceutical composition comprising a ligand of claim 1.

93. (canceled)

94. A method of inhibiting proliferation of B cells in a subject, comprising administering to the subject a pharmaceutical composition comprising a ligand of claim 1.

95. A ligand that has binding specificity for IL-4 and IL-13 comprising a protein moiety that has a binding site with binding specificity for IL-4, and a protein moiety that has a binding site with binding specificity for IL-13, wherein the protein moiety that has binding specificity for IL-13 does not compete for binding with DOM10-275-78 (SEQ ID NO:2456), DOM10-275-94 (SEQ ID NO:2457), DOM10-275-99 (SEQ ID NO:2458), DOM10-275-100 (SEQ ID NO:2459) and DOM10-275-101 (SEQ ID NO:2460).

96. The ligand of claim 95, with the proviso that the ligand does not comprise an IL-4 trap or an IL-13 trap.

97. A ligand that has binding specificity for IL-4 and IL-13, wherein said ligand is a fusion protein comprising an immunoglobulin single variable domain with binding specificity for IL-4 and an immunoglobulin single variable domain with binding specificity for IL-13, wherein
said immunoglobulin single variable domain with binding specificity for IL-4 inhibits binding of an anti-IL-4 domain antibody (dAb) selected from the group consisting of DOM9-112-210 and DOM9-155-78 to IL-4; and
said immunoglobulin single variable domain with binding specificity for IL-13 inhibits binding of an anti-IL-13 domain antibody (dAb) selected from the group consisting of DOM10-275-78 (SEQ ID NO:2456), DOM10-275-94 (SEQ ID NO:2457), DOM10-275-99 (SEQ ID NO:2458), DOM10-275-100 (SEQ ID NO:2459) and DOM10-275-101 (SEQ ID NO:2460) to IL-13.

98. A ligand that has binding specificity for interleukin-4 (IL-4) and interleukin-13 (IL-13) comprising
a protein moiety that has a binding site with binding specificity for IL-4; and
a protein moiety that has a binding site with binding specificity for IL-13, with the proviso that said protein moiety that has a binding site with binding specificity for IL-4 is not an IL-4 receptor or IL-4 binding portion thereof, and said protein moiety that has a binding site with binding specificity for IL-13 inhibits binding to IL-13 with the anti-IL-13 domain antibody (dAb) DOM10-53-474 (SEQ ID NO:2369).

The application's sequence listing, which the Patent Office published only in electronic form, follows.

SEQUENCE LISTING (2476 sequences)

SEQ ID NO: 1 - DNA, 348 bp, Homo sapiens
gaggtgcagctgttggagtctgggggaggcttggtacagcctggggggtccctgcgtctctcctgtgcagcctccggattcacctttgcaaagtatcgtatggcttgggtccgccaggctccagggaagggtctagagtgggtctcatcgattaatactctgggtactacgacatactacgcagactccgtgaagggccggttcaccatctcccgcgacaattccaagaacacgctgtatctgcaaatgaacagcctgcgtgccgaggacaccgcggtatattactgtgcgaaagatgatcctccgtttgactactggggtcagggaaccctggtcaccgtttcgagc

SEQ ID NO: 2 - DNA, 348 bp, Homo sapiens
gaggtgcagctgttggagtctgggggaggcttggtacagcctggggggtccctgcgtctctcctgtgcagcctccggattcacctttgagctgtataggatggcttgggtccgccaggctccagggaagggtctagagtgggtctcacagattgagcctgatggtgggggtacatactacgcagactccgtgaagggccggttcaccatctcccgcgacaattccaagaacacgctgtatctgcaaatgaacagcctgcgtgccgaggataccgcggtatattactgtgcgaaagatgagtttccttttgactactggggtcagggaaccctggtcaccgtttcgagc

SEQ ID NO: 3 - DNA, 348 bp, Homo sapiens
gaggtgcagctgttggagtctgggggaggcttggtacagcctggggggtccctgcgtctctcctgtgcagcctctggattcacctttaagaattatgcgatgggttgggtccgccaggctccagggaagggtctggagtgggtctcatatattccggatcatggtgttgatacatactacgcagactccgtgaagggccggttcaccatctcccgcgacaattccaagaacacgctgtatctgcaaatgaacagcctgcgtgccgaggacaccgcggtatattactgtgcgaaatcgttgggtcgttttgactactggggtcagggaaccctggtcaccgtctcgagc

SEQ ID NO: 4 - DNA, 348 bp, Homo sapiens
gaggtgcagctgttggagtctgggggaggcttggtacagcctggggggtccctgcgtctctcctgtgcagcctccggattcacctttagggattatagtatggggtgggtccgccaggctccagggaagggtctggagtgggtctcatttattacgcagcatggtagggatacatactacgcagactccgtgaagggccggttcaccatctcccgcgacaattccgagaacacgctgtatctgcaaatgaacagcctgcgtgccgaggacaccgcggtatattactgtgcgaaatctctgtcgaggtttgactactggggtcagggaaccctggtcaccgtctcgagc

SEQ ID NO: 5 - DNA, 347 bp, Homo sapiens
gaggtgcagctgttggagtctgggggaggcttggtacagcctggggggtccctgcgtctctcctgtgcagcctccggattcacctttggtcgttatatgatggtttgggtccgccaggctccagggaagggtctagagtgggtctcagctatttcgcctccgggtgattcgacatactacgcagactccgtgaagggccggttcaccatctcccgcgacaattccaagaacacgctgtatctgcaaatgaacagcctgcgtgccgaggacaccgcggtatattactgtgcgaaaagtcttggtaggtttgactactggggtcagggaaccctggtcaccgtccgagc

SEQ ID NO: 6 - DNA, 348 bp, Homo sapiens
gaggtgcagctgttggagtctgggggaggcttggtacagcctggggggtccctgcgtctctcctgtgcagcctccggattcacctttggtttgtattcgatggcgtgggtccgccaggctccagggaagggtctggagtgggtctcatttattacgtctaatggtcgttctacatactacgcagactccgtgaagggccggttcaccatctcccgcgacaattccaagaacacgctgtatctgcaaatgaacagcctgcgtgccgaggacaccgcggtatattactgtgcgaaaactctggggcggtttgactactggggtcagggaaccctggtcaccgtctcgagc

SEQ ID NO: 7 - DNA, 348 bp, Homo sapiens
gaggtgcagctgttggagtctgggggaggcttggtacagcctggggggtccctgcgtctctcctgtgcagcctccggattcacctttggtcgttatatgatggtttgggtccgccaggctccagggaagggtctagagtgggtctcagctatttcgcctccgggtgattcgacatactacgcagactccgtgaagggccggttcaccatctcccgcgacaattccaagaacacgctgtatctgcaaatgaacagcctgcgtgccgaggacaccgcggtatattactgtgcgaaaagtcttggtaggtttgactactggggtcagggaaccctggtcaccgtttcgagc

SEQ ID NO: 8 - DNA, 348 bp, Homo sapiens
gaggtgcagctgttggagtctgggggaggcttggtacagcctggggggtccctgcgtctctcctgtgcagcctccggattcacctttgaggagtatgggatggcttgggcccgccaggctccagggaagggtctggagtgggtctcatatattgtggctgatggtgcgcgtacatactacgcagactccgtgaagggccggttcaccatctcccgcgacaattccaagaacacgctgtatctgcaaatgaacagcctgcgtgccgaggacaccgcggtatattactgtgcgaaatcgttggggcggtttgactactggggtcagggaaccctggtcaccgtctcgagc

SEQ ID NO: 9 - DNA, 348 bp, Homo sapiens
gaggtgcagttgttggagtctgggggaggcttggtacagcctggggggtccctgcgtctctcctgtgcagcctccggattcacctttatgagttatcagatgaattgggtccgccaggctccagggaagggtctagagtgggtctcagctattagtcctgatggtgcgtttacatactacgcagactccgtgaagggccggttcaccatctcccgcgacaattccaagaacacgctgtatctgcaaatgaacagcctgcgtgccgaggacaccgcggtatattactgtgcgaaaagtcttggtaggtttgactactggggtcagggaaccctggtcaccgtctcgagc

SEQ ID NO: 10 - DNA, 348 bp, Homo sapiens
gaggtgcagctgttggagtctgggggaggcttggtacagcctggggggtccctgcgtctctcctgtgcagcctccggattcacctttcttcggtatggtatggggtgggtccgccaggctccagggaagggtctagagtgggtctcatggattgagccgagtggtcatagtacgtactacgcagactccgtgaagggccggttcaccatctcccgcgacaattccaagaacacgctgtatctgcaaatgaacagcctgcgtgccgaggacaccgcggtatattactgtgcgaaaagttatggtgcttttgactactggggccagggaaccctggtcaccgtctcgagc

SEQ ID NO: 11 - DNA, 348 bp, Homo sapiens
gaggtgcagctgttggagtctgggggaggcttggtacagcctggggggtccctgcgtctctcctgtgcagcctccggattcacctttggtcggtatgatatgtgttgggtccgccaggctccagggaagggtctagagtgggtctcagggattcattttgatggtatggagacatactacgcagactccgtgaagggccggttcaccatctcccgcgacaattccaagaacacgctgtatctgcaaatgaacagcctgcgtgccgaggacaccgcggtatattactgtgcgaaagatcagtggccgtttgactactggggtcagggaaccctggtcaccgtttcgagc

SEQ ID NO: 12 - DNA, 348 bp, Homo sapiens
gaggtgcagctgttggagtctgggggaggcttggtacagcctggggggtccctgcgtctctcctgtgcagcctccggattcacctttgcgaattatggtatgggttgggtccgccaggctccagggaagggtctagagtgggtctcatatattagtcctattggccctcgtacatactatgcagactccgtgaagggccggttcaccatctcccgcgacaattccaagaacacgctgtatctgcaaatgaacagcctgcgtgccgaggacaccgcggtatattactgtgcgaaaagttatggtgcttttgactactggggccagggaaccctggtcaccgtctcgagc

SEQ ID NO: 13 - DNA, 348 bp, Homo sapiens
gaggtgcagctgttggagtctgggggaggcttggtacagcctggggggtccctgcgtctctcctgtgcagcctccggattcacctttcggtggtatggtatgggttgggtccgccaggctccagggcagggtctggagtgggtctcatatattttgcctgggggttcggagacatactacgcagactccgtgaagggccggttcaccatctcccgcgacaattccaagaacacgctgtatctgcaaatgaacagcctgcgtgccgaggacaccgcggtatattactgtgcgaaaagttatggtgcttttgactactggggtcagggaaccctggtcaccgtctcgagc

SEQ ID NO: 14 - DNA, 348 bp, Homo sapiens
gaggtgcagctgttggagtctgggggaggcttggtacagcctggggggtccctgcgtctctcctgtgcagcctccggattcacctttgaggcgtatgggatgggttgggtccgccaggctccagggaagggtctagagtgggtctcatttattacttcgtctggtctttcgacatactacgcagactccgtgaagggccgattcaccatctcccgcgacaattccaagaacacgctgtatctgcaaatgaacagcctgcgtgccgaggataccgcggtatattactgtgcgaaatcgttgggtaggtttgactactggggtcagggaaccctggtcaccgtctcgagc

SEQ ID NO: 15 - DNA, 348 bp, Homo sapiens
gaggtgcagctgttggagtctgggggaggcttggtacagcctggggggtccctgcgtctctcctgtgcagcctccggattcacctttagggattattctatgggttgggtccgccaggctccagggaagggtctagagtgggtctcatatattgagactgagggtcgtcgtacatactacgcagactccgtgaagggccggttcaccatctcccgcgacaattccaagaacacgctgtatctgcaaatgaacagcctgcgtgccgaggacaccgcggtatattactgtgcgaaatcgctggggcgttttgactactggggtcagggaaccctggtcaccgtctcgagc

SEQ ID NO: 16 - DNA, 348 bp, Homo sapiens
gaggtgcagctgttggagtctgggggaggcttggtacagcctggggggtccctgcgtctctcctgtgcagcctccggattcaccttttctgagtatagtatggcgtgggtccgccaggctccagggaagggtctagagtgggtctcatatattccgcatgatggtatgcggacatactacgcagactccgtgaagggccggttcaccatctcccgcgacaattccaagaacacgctgtatctgcaaatgaacagcctgcgtgccgaggacaccgcggtatattactgtgcgaaatcgcttagtcgttttgactactggggtcagggaaccctggtcaccgtctcgagc

SEQ ID NO: 17 - DNA, 348 bp, Homo sapiens
gaggtgcagctgttggagtctgggggaggcttggtacagcctggggggtccctgcgtctctcctgtgcagcctccggattcacctttaagcagtatggtatggcttgggtccgccaggctccagggaagggtctagagtgggtctcatggattgatggtgttggtcttagtacatactacgcagactccgtgaagggccggttcaccatctcccgcgacaattccaagaacacgctgtatctgcaaatgaacagcctgcgtgccgaggacaccgcggtatattactgtgcgaaatcgctgtctcggtttgactactggggtcagggaaccctggtcaccgtctcgagc

SEQ ID NO: 18 - DNA, 348 bp, Homo sapiens
gaggtgcagctgttggagtctgggggaggcttggtacagcctggggggtccctgcgtctctcctgtgcagcctccggattcacctttgaggagtatgggatgggttgggtccgccaggctccagggaagggtctggagtgggtctcatggattcctgagggtggtaggaggacatactacgcagactccgtgaagggccggttcaccatctcccgcgacaattccaagaacacgctgtatctgcaaatgaacagcctgcgtgccgaggataccgcggtatattactgtgcgaaaaattattcgccttttgactactggggtcagggaaccctggtcaccgtctcgagc

SEQ ID NO: 19 - DNA, 348 bp, Homo sapiens
gaggtgcagctgttggagtctgggggaggcttggtacagcctggggggtccctgcgtctctcctgtgcagcctccggattcacctttgctgagtattcgatgaattgggtccgccaggctccagggaagggtctagagtgggtctcacatattaatgcggctggtaatcgtacatactacgcagactccgtgaagggccggttcaccatctcccgtgacaattccaagaacacgctgtatctgcaaatgaacagcctgcgtgccgaggacaccgcggtatattactgtgcgaaatctcttgggcggtttgactactggggtcagggaaccctggtcaccgtctcgagc

SEQ ID NO: 20 - DNA, 348 bp, Homo sapiens
gaggtgcagctgttggagtctgggggaggcttggtacagcctggggggtccctgcgtctctcctgtgcagcctccggattcacctttacgtcgtatggtatgggttgggtccgccaggctccagggaagggtctagagtgggtctcatatattctggcggcgggtaatgcgacctactacgcagactccgtgaagggccggttcaccatctcccgcgacaattccaagaacacgctgtatctgcaaatgaacagcctgcgtgccgaggacaccgcggtatattactgtgcgaaaagttatggtgcttttgactactggggccagggaaccctggtcaccgtttcgagc

SEQ ID NO: 21 - DNA, 348 bp, Homo sapiens
gaggtgcagctgttggagtctgggggaggcttggtacagcctggggggtccctgcgtctctcctgtgcagcctccggattcacctttcagagttatgcgatggggtgggtccgccaggctccagggaagggtctagagtgggtctcatatatttcgcctacgggtcatcatacatactacgcagactccgtgaagggccggttcaccatctcccgcgacaattccaagaacacgctgtatctgcaaatgaacagcctgcgtgccgaggacaccgcggtatattactgtgcgaaatcgcttggtcgttttgactactggggtcagggaaccccggtcaccgtttcgagc

SEQ ID NO: 22 - DNA, 348 bp, Homo sapiens
gaggtgcagctgttggagtctgggggaggcttggtacagcctggggggtccctgcgtctctcctgtgcagcctccggattcacctttgtgtcgtatcctatggggtgggtccgccaggctccagggaagggtcttgagtgggtctcatggattcctggtgatggtagtgctacatactacgcagactccgtgaagggccggttcaccatctcccgcgacaattccaagaacacgctgtatctgcaaatgaacagcctgcgtgccgaggacaccgcggtatattactgtgcgaaatctcttagtcgttttgactactggggtcagggaaccctggtcaccgtctcgagc

SEQ ID NO: 23 - DNA, 348 bp, Homo sapiens
gaggtgcagctgttggagtctgggggaggcttggtacagcctggggggtccctgcgtctctcctgtgcagcctccggattcacctttaatcattatggcatgggttgggtccgccaggctccagggaagggtctggagtgggtctcatatattacgtttccgggtttgcagacatactacgcagactccgtgaagggccggttcaccatctcccgcgacaattccaagaacacgctgtatctgcaaatgaacagcctgcgtgccgaggacaccgcggtatattactgtgcgaaaagttatggtgcttttgactactggggtcagggaaccctggtcaccgtctcgagc

SEQ ID NO: 24 - DNA, 348 bp, Homo sapiens
gaggtgcagctgctggagtctgggggaggcttggtacagcctggggggtccctgcgtctctcctgtgcagcctccggattcacctttatgtattatgggatgggttgggtccgccaggctccagggaagggtctagagtgggtctcatggattactgcgaatggtagttcgacatactacgcagactccgtgaagggccggttcaccatctcccgcgacaattccaagaacacgctgtatctgcaaatgaacagcctgcgtgccgaggacaccgcggtatattactgtgcgaaatctctgggtcgttttgactactggggtcagggaaccctggtcaccgtctcgagc

SEQ ID NO: 25 - DNA, 348 bp, Homo sapiens
gaggtgcagctgttggagtctgggggaggcttggtacagcctggggggtccctgcgtctctcctgtgcagcctccggattcacctttcgtaattatgggatggcgtgggtccgccaggctccagggaagggtctagagtgggtctcatggattgatgcgtctggtactgagacatactacgcagactccgtgaagggccggttcaccatctcccgcgacaattccaagaacacgctgtatctgcaaatgaacagcctgcgtgccgaggacaccgcggtatattactgtgcgaaaagtctggggcgttttgactactggggtcagggaaccctggtcaccgtctcgagc

SEQ ID NO: 26 - DNA, 348 bp, Homo sapiens
gaggtgcagctgttggagtctgggggaggcttggtacagcctggggggtccctgcgtctctcctgtgcagcctccggattcacctttcgtaattatgggatggcgtgggtccgccaggctccagggaagggtctagagtgggtctcatggattgatgcgtctggtactgagacatactacgcagactccgtgaagggccggttcaccatctcccgcgacaattccaagaacacgctgtatctgcaaatgaacagcctgcgtgccgaggacaccgcggtatattactgtgcgaaaagtctggggcgttttgactactggggtcagggaaccccggtcaccgtctcgagc

SEQ ID NO: 27 - DNA, 348 bp, Homo sapiens
gaggtgcagctgttggagtctgggggaggcttggtacagcctggggggtccctgcgtctctcctgtgcagcctccggattcacctttcgtaattatgggatggcgtgggtccgccaggctccagggaagggtctagagtgggtctcatggattgatgcgtctggtactgagacatattactcgagttccgtgaagggccggttcaccatctcccgcgacaattccaagaacacgctgtatctgcaaatgaacagcctgcgtgccgaggacaccgcggtatattactgtgcgaaaagtctggggcgttttgactactggggtcagggaaccctggtcaccgtctcgagc

SEQ ID NO: 28 - DNA, 348 bp, Homo sapiens
gaggtgcagctgttggagtctgggggaggcttggtacagactggggggtccctgcgtctctcctgtgcagcctccggattcacctttcgtaattatgggatggcgtgggtccgccaggctccagggaagggtctagagtgggtctcatggattgatgcgtctggtactgagacatactacgcagactccgtgaagggccggttcaccatctcccgcgacaattccaagaacacgctgtatctgcaaatgaacagcctgcgtgccgaggacaccgcggtatattactgtgcgaaaagtctggggcggtttgactactggggtcagggaaccctggtcaccgtctcgagc

SEQ ID NO: 29 - DNA, 348 bp, Homo sapiens
gaggtgcagctgttggagtctgggggaggcttggtacagcctggggggtccctgcgtctctcctgtgcagcctccggattcacctttcgtaattatgggacggcgtgggtccgccaggctccagggaagggtctagagtgggtctcatggattgatgcgtctggtactgagacatactacgcagactccgtgaagggccggttcaccatctcccgcgacaattccaagaacacgctgtatctgcaaatgaacagcctgcgtgccgaggacaccgcggtatattactgtgcgaaaagtctggggcgttttgactactggggtcagggaaccctggtcaccgtctcgagc

SEQ ID NO: 30 - DNA, 348 bp, Homo sapiens
gaggtgcagctgttggagtctgggggaggcttggtacagcctggggggtccctgcgtctctcctgtgcagcctccggattcacctttcgtaattatgggatggcgtgggtccgccaggctccagggaagggtctagagtgggtctcatggattgatgcgtctggtactgagacatactacgcagaccccgtgaagggccggatcaccatctcccgcgacaattccaagaacacgctgtatctgcaaatgaacagcctgcgtgccgaggacaccgcggtatattactgtgcgaaaagtctggggcgttttgattactggggtcagggaaccctggtcaccgtctcgagc

SEQ ID NO: 31 - DNA, 348 bp, Homo sapiens
gaggtgcagctgtcggagtctgggggaggcttggtacagcctggggggtccctgcgtctctcctgtgcagcctccggattcacctttcgtaattatgggatggcgtgggtccgccaggctccagggaagggtctagagtgggtctcatggattgatgcgtctggtactgagacatactacgcagactccgtgaagggccggttcaccatctcccgcgacaattccaagaacacgctgtatctgcaaatgaacagcctgcgtgccgaggacaccgcggtatattactgtgcgaaaagtctggggcgttttgactactggggtcagggaaccctggtcaccgtctcgagc

SEQ ID NO: 32 - DNA, 348 bp, Homo sapiens
gaggtgcagctgttggagtctgggggaggcttggtacagcctggggggtccctgcgtctctcctgtgcagtctccggattcacctttcgtaattatgggatggcgtgggtccgccaggctccagggaagggtctagagtgggtctcatggattgatgcgtctggtactgagacatactacgcagactccgtgaagggccggttcaccatctcccgcgacaattccaagaacacgctgtatctgcaaatgaacagcctgcgtgccgaggacaccgcggtatattactgtgcgaaaagtctggggcgttttgactactggggtcagggaaccctggtcaccgtctcgagc

SEQ ID NO: 33 - DNA, 348 bp, Homo sapiens
gaggtgcagctgttggagtctgggggaggcttggtacggcctggggggtccctgcgtctctcctgtgcagcctccggattcacctttcgtaattatgggatggcgtgggtccgccaggctccagggaagggtctagagtgggtctcatggattgatgcgtctggtactgagacatactacgcagactccgtgaagggccggttcaccatctcccgcgacaattccaagaacacgctgtatctgcaaatgaacagcctgcgtgccgaggacaccgcggtatattactgtgcgaaaagtctggggcgttttgattactggggtcagggaaccctggtcaccgtctcgagc

SEQ ID NO: 34 - DNA, 348 bp, Homo sapiens
  misc_feature 88, 195: n = A,T,C or G
gaggtgcagctgttggagtctgggggaggcttggtacagcctggggggtccctgcgtctctcctgtgcagcctccggattcacctttngtaattatgggatggcgtgggtccgccaggctccagggaagggtctagagtgggtctcatggatttatgcgtctggtactgagacatactacgcagactccgtgaanggccggttcaccatctcccgcgacaattccaagaacacgctgtatctgcaaatgaacagcctgcgtgccgaggacaccgcggtatattactgtgcgaaaagtctggggcgttttgactactggggtcagggaaaccctggtcacctctcgagc

SEQ ID NO: 35 - DNA, 348 bp, Homo sapiens
gaggtgcagctgttggagtctgggggaggcttggtacagcctggggggtccctgcgtctctcctgtgcagcctccggattcacctttcgtaattatgggatggcgtgggtccgccaggctccagggaagggtctagagtgggtctcatggattgatgcgtctggtactgagacatattacgcagactccgtgaagggccggttcaccttctcccgcgacaattccaagaacacgctgtatctgcaaatgaacagcctgcgtgccgaggacaccgcggtatattactgtgcgaaaagtctggggcgttttgactactggggtcagggaaccctggtcaccgtctcgagc

SEQ ID NO: 36 - DNA, 348 bp, Homo sapiens
gaggtgcagctgttggagtctgggggaggcttggtacagcctggggggtccctgcgtctctcctgtgcagcctccggattcacctttcgtaattatgggatggcgtgggtccgccaggctccagggaagggtctagagtgggtctcatggattgatgcgtctggtactgagacatactacgcagactccgtgaagggccggttaaccatctcccgcgacaattccaagaacacgctgtatctgcaaatgaacagcctgcgtgccgaggacaccgcggtatattactgtgcgaaaagtctggggcgttttgactactggggtcagggaaccctggtcaccgtctcgagc

SEQ ID NO: 37 - DNA, 348 bp, Homo sapiens
gaggtgcagctgttggagtctgggggaggcttggtacagcctggggggtccctgcgtctctcctgtgcagcctccggattcacctttcgtaattatgggatggcgtgggtccgccaggctccagggaagggtctagagtgggtctcatggattgatgcgtctggtactgagacatactacgcagacgccgtgaagggccggttcaccatctcccgcgacaattccaagaacacgctgtatctgcaaatgaacagcctgcgtgccgaggacaccgcggaatattactgtgcgaaaagtctggggcgttttgactactggggtcagggaaccctggtcaccgtctcgagc

SEQ ID NO: 38 - DNA, 348 bp, Homo sapiens
gaggtgcagctgttggagtctgggggaggcttggtacagcctggggggcccctgcgtctctcctgtgcagcctccggtttcacctttcgtaattatgggatggcgtgggtccgccaggctccagggaagggtctagagtgggtctcatggattgatgcgtctggtactgagacatactacgcagactccgtgaagggccggttcaccatctcccgcgacaattccaagaacacgctgtatctgcaaatgaacagcctgcgtgccgaggacaccgcggtatattactgtgcgaaaagtctggggcgctttgactactggggtcagggaaccctggtcaccgtctcgagc

SEQ ID NO: 39 - DNA, 348 bp, Homo sapiens
gaggtgcagctgttggagtctgggggaggcttggtacagcctggggggtccctgcgtctctcctgtgcagcctccggattcacctttcgtaattatgggatggcgtgggtccgccaggctccagggaagggtctagagtgggtctcatggattgatgcgtctggtactgagacatattacgcgacttccgtgaagggccggttcaccatctcccgcgacaattccaagaacacgctgtatctgcaaatgaacagcctgcgtgccgaggacaccgcggtatattactgtgcgaaaagtctggggcgttttgattactggggtcagggaaccctggtcaccgtttcgagc

SEQ ID NO: 40 - DNA, 348 bp, Homo sapiens
gaggtgcagctgttggactctgggggaggcttggtacagcctggggggtccctgcgtctctcctgtgcagcctccggattcacctttcgtaattatgggatggcgtgggtccgccaggctccagggaagggtctagagtgggtctcatggattgatgcgtctggtactgagacatactacgcagactccgtgaagggccggttcaccatctcccgcgacaattccaagaacacgctgtatctgcaaatgaacagcctgcgtgccgaggacaccgcggtatattactgtgcgaaaagtctggggcgttttgactactggggtcagggaaccctggtcaccgtctcgagc

SEQ ID NO: 41 - DNA, 348 bp, Homo sapiens
gaggtgcagctgttggagtctgggggaggcttggtacagcctggggggtccctgcgtctctcctgtgcagcctccggattcacctttcgtaattatgggatggcgtgggtccgccaggctccagggaagggtctagagtgggtctcatggattgatgcgtctggtactgagacatactacgcagactccgtgaagggccggttcaccatctcccgcgacaattacaagaacacgctgtatctgcaaatgaacagcctgcgtgccgaggacaccgcggtatattactgtgcgaaaagtctggggcgttttgactactggggtcagggaacccaggtcaccgtctcgagc

SEQ ID NO: 42 - DNA, 348 bp, Homo sapiens
  misc_feature 317, 325: n = A,T,C or G
gaggtgcagctgttggactctgggggaggcttggtacagcctggggggtccctgcgtctctcctgtgcagcctccggattcacctttcgtaattatgggatggcgtgggtccgccaggctccagggaagggtctagagtgggtctcatggattgatgcgtctggtactgagacatactacgcagactccgtgaagggccggttcaccatctcccgcgacaattccaagaacacgctgtatctgcaaatgaacagcctgcgtgccgaggacaccgcggtatattactgtgcgaaaagtctggggcgttttgactactngggtcagngaaccctggtcaccgtctcgagc

SEQ ID NO: 43 - DNA, 348 bp, Homo sapiens
gaggtgcagctgttggagtctgggggaggctcggtacagcctggggggtccctgcgtctctcctgtgcagcctccggattcacctttcgtaattatgggatggcgtgggtccgccaggctccagggaagggtctagagtgggtctcatggattgatgcgtctggtactgagacatactacgcagactccgtgaagggccggttcaccatctcccgcgacaattccaagaacacgctgtatctgcaaatgaacagcctgcgtgccgaggacaccgcggtatattactgtgcgaaaagtctggggcgttttgactactggggtcagggaaccctggttctcctctcgagc

SEQ ID NO: 44 - DNA, 348 bp, Homo sapiens
gaggtgcagctgttggagtctaggggaggcttggtacagcctggggggtccctgcgtctctcctgtgcagcctccggattcacctttcgtaattatgggatggcgtgggtccgccaggctccagggaagggtctagagtgggtctcatggattgatgcgtctggtactgagacatactacgcagactccgtgaagggccggttcaccatctcccgcgacaattccaagaacacgctgtatctgcaaatgaacagcctgcgtgccgaggacaccgcggtatattactgtgcgaaaagtctggggcgttttgactactggggtcagggaaccctggtcaccgtctcgagc

SEQ ID NO: 45 - DNA, 348 bp, Homo sapiens
gaggtgcagctgttggagtctgagggaggcttggtacagcctggggggtccctgcgtctctcctgtgcagcctccggattcacctttcgtaattatgggatggcgtgggtccgccaggctccagggaagggtctagagtgggtctcatggattgatgcgtctggtactgagacatactacgcagattccgtgaagggccggttcaccatctcccgcgacaattccaagaacacgctgtatctgcaaatgaacagcctgcgtgccgaggacaccgcggtatattactgtgcgaaaagtctggggcgttttgactactggggtcagggaaccctggtcaccgtctcgagc

SEQ ID NO: 46 - DNA, 348 bp, Homo sapiens
gaggtgcagctgttggagtatgggggaggcttggtacagcctggggggtccctgcgtctctcctgtgcagcctccggattcacctttcgtaattatgggatggcgtgggtccgccaggctccagggaagggtctagagtgggtctcatggattgatgcgtctggtactgagacatactacgcagactccgtgaagggccggttcaccatctcccgcgacaattccaagaacacgctgtatctgcaaatgaacagcctgcgtgccgaggacaccgcggtatattactgtgcgaaaagtctggggcgttttgactactggggtaagggaaccctggtcaccgtctcgagc

SEQ ID NO: 47 - DNA, 348 bp, Homo sapiens
gaggtgcagctgttggagtcttggggaggcttggtacagcctggggggtccctgcgtctctcctgtgcagcctccggattcacctttcgtaattatgggatggcgtgggtccgccaggctccagggaagggtctagagtggatctcatggattgatgcgtctggtactgagacatactacgcagaccccgtgaagggccggttcaccatctcccgcgacaattccaagaacacgctgtatctgcaaatgaacagcctgcgtgccgaggacaccgcggtatattactgtgcgaaaagtctggggcgttttgactactggggtcagggaaccctggtcaccgtctcgagc

SEQ ID NO: 48 - DNA, 348 bp, Homo sapiens
gaggtgcagctgttggagtctgggggaggcttggtacagcctggggggtccctgcgtctctcctgtgcagcctccggatacacctttcgtaattatgggatggcgtgggtccgccaggctccagggaagggtctagagtgggtctcatggattgatgcgtctggcactgagacatactacgcagactccgtgaagggccggttcacaatctcccgcgacaattccaagaacacgctgtatctgcaaatgaacagcctgcgtgccgaggacactgcggtatattactgtgcgaaaagtctggggcgttttgactactggggtcagggaaccctggtcaccgtctcgagc

SEQ ID NO: 49 - DNA, 348 bp, Homo sapiens
  misc_feature 20: n = A,T,C or G
gaggtgcagctgttggagtntgggggaggcttggtacagcctggggggtccctgcgtctctcctgtacagcctccggattcaccttccgtaactatgggatggcgtgggtccgccaggctccagggaagggtctagagtgggtctcatggattgatgcgtctggtactgagacatactacgcagactccgtgaagggccggttcaccatctcccgcgacaattccaagaacacgctgtatctgcaaatgaacagcctgcgtgccgaggacaccgcggtatattactgtgcgaaaagtctggggcgttttgactactggggtcagggaaccctggtcaccgtctcgagc

SEQ ID NO: 50 - DNA, 348 bp, Homo sapiens
gaggtgcagctgttggagtctgggggaggcttggtacagcctggggggtccctgcgtctctcctgtgcagcctccggattcacctttcgtaattatgggatggcgtgggtccgccaggctccagggaagggtctagagtgggtctcatggattgggcagtacggtgacgagacatactacgcagacttcgtgaagggccggttcaccatctcccgcgacaattccaagaacacgctgtatctgcaaatgaacagcctgcgtgccgaggacaccgcggtatattactgtgcgaaaagtctggggcgttttgactactggggtcagggaaccctggtcaccgtctcgagc

SEQ ID NO: 51 - DNA, 348 bp, Homo sapiens
  misc_feature 184: n = A,T,C or G
gaggtgcagctgttggagtctgggggaggcttggtacagcctggggggtccctgcgtctctcctgtgcagcctccggattcacctttcgtaattatgggatggcgtgggtccgccaggctccagggaagggtctagagtgggtctcatggatttcgccgtacggtagggagacatactacgcanacttcgtgaagggccggttcaccatctcccgcgacaattccaagaacacgctgtatctgcaaatgaacagcctgcgtgccgaggacaccgcggtatattactgtgcgaaaagtctggggcgttttgactactggggtcagggaaccctggtcaccgtctcgagc

SEQ ID NO: 52 - DNA, 348 bp, Homo sapiens
  misc_feature 184: n = A,T,C or G
gaggtgcagctgttggagtctgggggaggcttggtacagcctggggggtccctgcgtctctcctgtgcagcctccggattcacctttcgtaattatgggatggcgtgggtccgccaggctccagggaagggtctagagtgggtctcatggattgccgggtccggtagggagacatactacgcanacttcgtgaagggccggttcaccatctcccgcgacaattccaagaacacgctgtatctgcaaatgaacagcctgcgtgccgaggacaccgcggtatattactgtgcgaaaagtctggggcgttttgactactggggtcagggaaccctggtcaccgtctcgagc

SEQ ID NO: 53 - DNA, 348 bp, Homo sapiens
  misc_feature 184: n = A,T,C or G
gaggtgcagctgttggagtctgggggaggcttggtacagcctggggggtccctgcgtctctcctgtgcagcctccggattcacctttcgtaattatgggatggcgtgggtccgccaggctccagggaagggtctagagtgggtctcatggattgccgggccgggtaccgagacatactacgcanacttcgtgaagggccggttcaccatctcccgcgacaattccaagaacacgctgtatctgcaaatgaacagcctgcgtgccgaggacaccgcggtatattactgtgcgaaaagtctggggcgttttgactactggggtcagggaaccctggtcaccgtctcgagc

SEQ ID NO: 54 - DNA, 348 bp, Homo sapiens
  misc_feature 171, 184: n = A,T,C or G
gaggtgcagctgttggagtctggggggggcttggtacagcctggggggtccctgcgtctctcctgtgcagcctccggattcacctttgaccagtatgggatggcgtgggtccgccaggctccagggaagggtctagagtgggtctcatggattgatgcgtctggtactganacatactacgcanacaccgtgaagggccggttcaccctgtcccgcgacaattccaagaacacgctgtatctgcaaatgaacagcctgcgtgccgaggacaccgcggtatattactgtgcgaaaagtctggggcgttttgactactggggtcagggaaccctggtcaccgtctcgagc

SEQ ID NO: 55 - DNA, 348 bp, Homo sapiens
  misc_feature 184: n = A,T,C or G
gaggtgcagctgttggagtctgggggaggcttggtacagcctggggggtccctgcgtctctcctgtgcagcctccggattcaccttttggttgtatgggatggcgtgggtccgccaggctccagggaagggtctagagtgggtctcatggattgatgcgtctggtactgagacatactacgcanactccgtgaagggccggttcaccatctcccgcgacaattccaagaacgcgctgtatctgcaaatgaacagcctgcgtgccggggacaccgcggtatattactgtgcgaaaagtctggggcgttttgactactggggtcagggaaccctggtcaccgtctcgagc

SEQ ID NO: 56 - DNA, 348 bp, Homo sapiens
  misc_feature 184: n = A,T,C or G
gaggtgcagctgttggagtctgggggaggcttggtacagcctggggggtccctgcgtctctcctgtgcagcctccggattcacctttgggtactatgggatggcgtgggtccgccaggctccagggaagggtctagagtgggtctcatggattgatgcgtctggtactgagacatactacgcanaccacgtgaagggccggttcaccctctcccgcgacaattccaagaacacgctgtatctgcaaatgaacagcctgcgtgccgaggacaccgcggtatattactgtgcgaaaagtctggggcgttttgactactggggtcagggaaccctggtcaccgtctcgagc

SEQ ID NO: 57 - DNA, 348 bp, Homo sapiens
  misc_feature 184: n = A,T,C or G
gaggtgcagctgttggagtctgggggaggcttggtacagcctggggggtccctgcgtctctcctgtgcagcctccggattcacctttttcggctatgggatggcgtgggtccgccaggctccagggaagggtctagagtgggtctcatggattgatgcgtctggtactgagacatactacgcanacagggtgaagggccggttcaccgtctcccgcgacaattccaagaacacgctgtatctgcaaatgaacagcctgcgtgccgaggacaccgcggtatattactgtgcgaaaagtctggggcgttttgactactggggtcagggaaccctggtcaccgtctcgagc

SEQ ID NO: 58 - DNA, 348 bp, Homo sapiens
  misc_feature 9, 184, 228: n = A,T,C or G
gaggtgcanctgttggagtctgggggaggcttggtacagcctggggggtccctgcgtctctcctgtgcagcctccggattcacctttagcgactatgggatggcgtgggtccgccaggctccagggaagggtctagagtgggtctcatggattgatgcgtctggtactgagacatactacgcanacccggtgaagggccggttcaccttgtcccgcgacaattccaanaacacgctgtatctgcaaatgaacagcctgcgtgccgaggacaccgcggtatattactgtgcgaaaagtctggggcgttttgactactggggtcagggaaccctggtcaccgtctcgagc

SEQ ID NO: 59 - DNA, 348 bp, Homo sapiens
  misc_feature 184: n = A,T,C or G
gaggtgcagctgttggagtctgggggaggcttggtacagcctggggggtccctgcgtctctcctgtgcagcctccggattcacctttttcctctatgggatggcgtgggtccgccaggctccagggaagggtctagagtgggtctcatggattgatgcgtctggtactgagacatactacgcanaccccgtgaagggccggttcaccatctcccgcgacaattccaagaacacgctgtatctgcaaatgaacagcctgcgtgccgaggacaccgcggtatattactgtgcgaaaagtctggggcgttttgactactggggtcagggaaccctggtcaccgtctcgagc

SEQ ID NO: 60 - DNA, 348 bp, Homo sapiens
  misc_feature 9, 89, 184, 228: n = A,T,C or G
gaggtgcanctgttggagtctgggggaggcttggtacagcctggggggtccctgcgtctctcctgtgcagcctccggattcacctttanctactatgggatggcgtgggtccgccaggctccagggaagggtctagagtgggtctcatggattgatgcgtctggtactgagacatactacgcanacaaggtgaagggccggttcaccctgtcccgcgacaattccaanaacacgctgtatctgcaaatgaacagcctgcgtgccgaggacaccgcggtatattactgtgcgaaaagtctggggcgttttgactactggggtcagggaaccctggtcaccgtctcgggc

SEQ ID NO: 61 - DNA, 348 bp, Homo sapiens
  misc_feature 184: n = A,T,C or G
gaggtgcagctgttggagtctgggggaggcttggtacagcctggggggtccctgcgtctctcctgtgcagcctccggattcaccttttccaactatgggatggcgtgggtccgccaggctccagggaagggtctagagtgggtctcatggattgatgcgtctggtactgagacatactacgcanacatggtgaagggccggttcaccgtctcccgcgacaattccaagaacacgctgtatctgcaaatgaacagcctgcgtgccgaggacaccgcggtatattactgtgcgaaaagtctggggcgttttgactactggggtcagggaaccctggtcaccgtctcgagc

SEQ ID NO: 62 - DNA, 348 bp, Homo sapiens
  misc_feature 184: n = A,T,C or G
gaggtgcagctgttggagtctgggggaggcttggtacagcctggggggtccctgcgtctctcctgtgcagcctccggattcacctttggggagtatgggatggcgtgggtccgccaggctccagggaagggtctggagtgggtctcatggattgatgcgtctggtactgagacatactacgcanacccggtgaagggccggttcaccttgtcccgcgacaattccaagaacgcgctgtatctgcaaatgaacagcctgcgtgccgaggacaccgcggtatattactgtgcgaaaagtctggggcgttttgactactggggtcagggaaccctggtcaccgtctcgagc

SEQ ID NO: 63 - DNA, 348 bp, Homo sapiens
  misc_feature 184: n = A,T,C or G
gaggtgcagctgttggagtctgggggaggcttggtacagcctggggggtccctgcgtctctcctgtgcagcctccggattcacctttaagcactatgggatggcgtgggtccgccaggctccagggaagggtctagagtgggtctcatggattgatgcgtctggtactgagacatactacgcanactcggtgaagggccggttcaccttgtcccgcgacaattccaagaacacgctgtatctgcaaatgaacagcctgcgtgccgaggacaccgcggtatattactgtgcgaaaagtctggggcgttttgactactggggtcagggaaccctggtcaccgtctcgagc

SEQ ID NO: 64 - DNA, 348 bp, Homo sapiens
  misc_feature 171, 184, 187: n = A,T,C or G
gaggtgcagctgttggagtctgggggaggcttggtacagcctggggggtccctgcgtctctcctgtgcagcctccggattcacctttccgtactatgggatggcgtgggtccgccaggctccagggaagggtctagagtgggtctcatggattgatgcgtctggtactganacatactacgcanacncggtgaagggccggttcaccttgtcccgcgacaattccaagaacacgctgtatctgcaaatgaacagcctgcgtgccgaggacaccgcggtatattactgtgcgaaaagtctggggcgttttgactactggggtcagggaaccctggtcaccgtctcgagc

SEQ ID NO: 65 - DNA, 348 bp, Homo sapiens
gaggtgcagctgttggagtctgggggaggcttggtacagcctggggggtccctgcgtctctcctgtgcagcctccggattcacctttaggaagtatgggatggcgtgggtccgccaggctccagggaagggtctagagtgggtctcatggattgatgcgtctggtactgagacatactacgcagacacggtgaagggccggttcaccatctcccgcgacaattccaagaacacgctgtatctgcaaatgaacagcctgcgtgccgaggacaccgcggtatattactgtgcgaaaagtctggggcgttttgactactggggtcagggaaccctggtcaccgtctcgagc

SEQ ID NO: 66 - DNA, 348 bp, Homo sapiens
  misc_feature 184: n = A,T,C or G
gaggtgcagctgttggagtctgggggaggcttggtacagcctggggggtccctgcgtctctcctgtgcagcctccggattcacctttctgatgtatgggatggcgtgggtccgccaggctccagggaagggtctagagtgggtctcatggattgatgcgtctggtactgagacatactacgcanaccccgtgaagggccggttcaccatctcccgcgacaattccaagaacacgctgtatctgcaaatgaacagcctgcgtgccgaggacaccgcggtatattactgtgcgaaaagtctggggcgttttgactactggggtcagggaaccctggtcaccgtctcgagc

SEQ ID NO: 67 - DNA, 348 bp, Homo sapiens
  misc_feature 9: n = A,T,C or G
gaggtgcanctgttggagtctgggggaggcttggtacagcctggggggtccctgcgtctctcctgtgcagcctccggattcacctttaacaactatgggatggcgtgggtccgccaggctccagggaagggtctagagtgggtctcatggattgatgcgtctggtactgagacatactacgcagacacggtgaagggccggttcaccatgtcccgcgacaattccaagaacacgctgtatctgcaaatgaacagcctgcgtgccgaggacaccgcggtatattactgtgcgaaaagtctggggcgttttgactactggggtcagggaaccctggtcaccgtctcgagc

SEQ ID NO: 68 - DNA, 348 bp, Homo sapiens
  misc_feature 184, 187: n = A,T,C or G
gaggtgcagctgttggagtctgggggaggcttggtacagcctggggggtccctgcgtctctcctgtgcagcctccggattcacctttggcgagtatgggatggcgtgggtccgccaggctccagggaagggtctagagtgggtctcatggattgatgcgtctggtactgagacatactacgcanacnacgtgaagggccggttcaccatctcccgcgacaattccaagaacacgctgtatctgcaaatgaacagcctgcgtgccgaggacaccgcggtatattactgtgcgaaaagtctggggcgttttgactactggggtcagggaaccctggtcaccgtctcgagc

SEQ ID NO: 69 - DNA, 348 bp, Homo sapiens
  misc_feature 9, 155, 184: n = A,T,C or G
gaggtgcanctgttggagtctgggggaggcttggtacagcctggggggtccctgcgtctctcctgtgcagcctccggattcacctttcgtaattatgggatggcgtgggtccgccaggctccagggaagggtctagagtgggtctcatggattancggctcgggtagggagacatactacgcanacttcgtgaagggccggttcaccatctcccgcgacaattccaagaacacgctgtatctgcaaatgaacagcctgcgtgccgaggacaccgcggtatattactgtgcgaaaagtctggggcgttttgactactggggtcagggaaccctggtcaccgtctcgagc

SEQ ID NO: 70 - DNA, 348 bp, Homo sapiens
  misc_feature 169, 184: n = A,T,C or G
gaggtgcagctgttggagtctgggggaggcttggtacagcctggggggtccctgcgtctctcctgtgcagcctccggattcacctttcgtaattatgggatggcgtgggtccgccaggctccagggaagggtctagagtgggtctcatggattagcgggcggggttacnagacatactacgcanacttcgtgaagggccggttcaccatctcccgcgacaattccaagaacacgctgtatctgcaaatgaacagcctgcgtgccgaggacaccgcggtatattactgtgcgaaaagtctggggcgttttgactactggggtcagggaaccctggtcaccgtctcgagc

SEQ ID NO: 71 - DNA, 348 bp, Homo sapiens
  misc_feature 184: n = A,T,C or G
gaggtgcagctgttggagtctgggggaggcttggtacagcctggggggtccctgcgtctctcctgtgcagcctccggattcacctttcgtaattatgggatggcgtgggtccgccaggctccagggaagggtctagagtgggtctcatggatttcgagctcgggtggggagacatactacgcanacttcgtgaagggccggttcaccatctcccgcgacaattccaagaacacgctgtatctgcaaatgaacagcctgcgtgccgaggacaccgcggtatattactgtgcgaaaagtctggggcgttttgactactggggtcagggaaccctggtcaccgtctcgagc

SEQ ID NO: 72 - DNA, 348 bp, Homo sapiens
  misc_feature 159: n = A,T,C or G
gaggtgcagctgttggagtctgggggaggcttggtacagcctggggggtccctgcgtctctcctgtgcagcctccggattcacctttcgtaattatgggatggcgtgggtccgccaggctccagggaagggtctagagtgggtctcatggatttcggcnaacggtagggagacatactacgcagacttcgtgaagggccggttcaccatctcccgcgacaattccaagaacacgctgtatctgcaaatgaacagcctgcgtgccgaggacaccgcggtatattactgtgcgaaaagtctggggcgttttgactactggggtcagggaaccctggtcaccgtctcgagc

SEQ ID NO: 73 - DNA, 348 bp, Homo sapiens
  misc_feature 184: n = A,T,C or G
gaggtgcagctgttggagtctgggggaggcttggtacagcctggggggtccctgcgtctctcctgtgcagcctccggattcacctttcgtaattatgggatggcgtgggtccgccaggctccagggaagggtctagagtgggtctcatggatttccgggaagggtctcgagacatactacgcanacttcgtgaagggccggttcaccatctcccgcgacaattccaagaacacgctgtatctgcaaatgaacagcctgcgtgccgaggacaccgcggtatattactgtgcgaaaagtctggggcgttttgactactggggtcagggaaccctggtcaccgtctcgagc

SEQ ID NO: 74 - DNA, 348 bp, Homo sapiens
  misc_feature 184: n = A,T,C or G
gaggtgcagctgttggagtctgggggaggcttggtacagcctggggggtccctgcgtctctcctgtgcagcctccggattcacctttcgtaattatgggatggcgtgggtccgccaggctccagggaagggtctagagtgggtctcatggattcaggccaacggtggcgagacatactacgcanacttcgtgaagggccggttcaccatctcccgcgacaattccaagaacacgctgtatctgcaaatgaacagcctgcgtgccgaggacaccgcggtatattactgtgcgaaaagtctggggcgttttgactactggggtcagggaaccctggtcaccgtctcgagc

SEQ ID NO: 75 - DNA, 348 bp, Homo sapiens
  misc_feature 184: n = A,T,C or G
gaggtgcagctgttggagtctgggggaggcttggtacagcctggggggtccctgcgtctctcctgtgcagcctccggattcacctttcgtaattatgggatggcgtgggtccgccaggctccagggaagggtctggagtgggtctcatggattcactcgtccggtagcgagacatactacgcanacttcgtgaagggccggttcaccatctcccgcgacaattccaagaacacgctgtatctgcaaatgaacagcctgcgtgccgaggacaccgcggtatattactgtgcgaaaagtctggggcgttttgactactggggtcagggaaccctggtcaccgtctcgagc

SEQ ID NO: 76 - DNA, 348 bp, Homo sapiens
  misc_feature 184: n = A,T,C or G
gaggtgcagctgttggagtctgggggaggcttggtacagcctggggggtccctgcgtctctcctgtgcagcctccggattcacctttcgtaattatgggatggcgtgggtccgccaggctccagggaagggtctagagtgggtctcatggattgacggcaggggtagcgagacatactacgcanacttcgtgaagggccggttcaccatctcccgcgacaattccaagaacacgctgtatctgcaaatgaacagcctgcgtgccgaggacaccgcggtatattactgtgcgaaaagtctggggcgttttgactactggggtcagggaaccctggtcaccgtctcgagc

SEQ ID NO: 77 - DNA, 348 bp, Homo sapiens
  misc_feature 184: n = A,T,C or G
gaggtgcagctgttggagtctgggggaggcttggtacagcctggggggtccctgcgtctctcctgtgcagcctccggattcacctttcgtaattatgggatggcgtgggtccgccaggctccagggaagggtctggagtgggtctcatggattaacggcaggggttcggagacatactacgcanacttcgtgaagggccggttcaccatctcccgcgacaattccaagaacacgctgtatctgcaaatgaacagcctgcgtgccgaggacaccgcggtatattactgtgcgaaaagtctggggcgttttgactactggggtcagggaaccctggtcaccgtctcgagc

SEQ ID NO: 78 - DNA, 348 bp, Homo sapiens
  misc_feature 184: n = A,T,C or G
gaggtgcagctgttagagtctggggggggcttggtacagcctggggggtccctgcgtctctcctgtgcagcctccggattcacctttcgtaattatgggatggcgtgggtccgccaggctccagggaagggtctagagtgggtctcatggattagcgggaggggttcggagacatactacgcanacttcgtgaagggccggttcaccatctcccgcgacaattccaagaacacgctgtatctgcaaatgaacagcctgcgtgccgaggacaccgcggtatattactgtgcgaaaagtctggggcgttttgactactggggtcagggaaccctggtcaccgtctcgagc

SEQ ID NO: 79 - DNA, 348 bp, Homo sapiens
  misc_feature 9, 184: n = A,T,C or G
gaggtgcanctgttggagtctgggggaggcttggtacagcctggggggtccctgcgtctctcctgtgcagcctccggattcacctttcgtaattatgggatggcgtgggtccgccaggctccagggaagggtctagagtgggtctcatggattcactccttgggtggggagacatactacgcanacttcgtgaagggccggttcaccatctcccgcgacaattccaagaacacgctgtatctgcaaatgaacagcctgcgtgccgaggacaccgcggtatattactgtgcgaaaagtctggggcgttttgactactggggtcagggaaccctggtcaccgtctcgagc

SEQ ID NO: 80 - DNA, 348 bp, Homo sapiens
  misc_feature 184: n = A,T,C or G
gaggtgcagctgttggagtctgggggaggcttggtacagcctggggggtccctgcgtctctcctgtgcagcctccggattcacctttcgtaattatgggatggcgtgggtccgccaggctccagggaagggtctagagtgggtctcatggattgcgggcaacggtcaggagacatactacgcanacttcgtgaagggccggttcaccatctcccgcgacaattccaagaacacgctgtatctgcaaatgaacagcctgcgtgccgaggacaccgcggtatattactgtgcgaaaagtctggggcgttttgactactggggtcagggaaccctggtcaccgtctcgagc

SEQ ID NO: 81 - DNA, 348 bp, Homo sapiens
gaggtgcagctgttggagtctgggggaggcttggtacagcctggggggtccctgcgtctctcctgtgcagcctccggattcacctttcgtaattatgggatggcgtgggtccgccaggctccagggaagggtctggagtgggtctcatggattaacagcaacggtagggagacatactacgcagacttcgtgaagggccggttcaccatctcccgcgacaattccaagaacacgctgtatctgcaaatgaacagcctgcgtgccgaggacaccgcggtatattactgtgcgaaaagtctggggcgttttgactactggggtcagggaaccctggtcaccgtctcgagc

SEQ ID NO: 82 - DNA, 348 bp, Homo sapiens
  misc_feature 184: n = A,T,C or G
gaggtgcagctgttggagtctgggggaggcttggtacagcctggggggtccctgcgtctctcctgtgcagcctccggattcacctttcgtaattatgggatggcgtgggtccgccaggctccagggaagggtctagagtgggtctcatggattgacgggtacggtaaggagacatactacgcanacttcgtgaagggccggttcaccatctcccgcgacaattccaagaacacgctgtatctgcaaatgaacagcctgcgtgccgaggacaccgcggtatattactgtgcgaaaagtctggggcgttttgactactggggtcagggaaccctggtcaccgtctcgagc

SEQ ID NO: 83 - DNA, 348 bp, Homo sapiens
  misc_feature 184: n = A,T,C or G
gaggtgcagctgttggagtctgggggaggcttggtacagcctggggggcccctgcgtctctcctgtgcagcctccggattcacctttcggacgtatgggatggcgtgggtccgccaggctccagggaagggtctagagtgggtctcatggattgatgcgtctggtactgagacatactacgcanacaacgtgaagggccggttcaccatctcccgcgacaattccaagaacacgctgtatctgcaaatgaacagcctgcgtgccgaggacaccgcggtatattactgtgcgaaaagtctggggcgttttgactactggggtcagggaaccctggtcaccgtctcgagc

SEQ ID NO: 84 - DNA, 348 bp, Homo sapiens
  misc_feature 184: n = A,T,C or G
gaggtgcagctgttggagtctgggggaggcttggtacagcctggggggtccctgcgtctctcctgtgcagcctccggattcaccttttggtactatgggatggcgtgggtccgccaggctccagggaagggtctagagtgggtctcatggattgatgcgtctggtactgagacatactacgcanacaccgtgaagggccggttcaccctgtcccgcgacaattccaagaacacgctgtatctgcaaatgaacagcctgcgtgccgaggacaccgcggtatattactgtgcgaaaagtctggggcgttttgactactggggtcagggaaccctggtcaccgtctcgagc

SEQ ID NO: 85 - DNA, 348 bp, Homo sapiens
  misc_feature 184: n = A,T,C or G
gaggtgcagctgttggagtctgggggaggcttggtacagcctggggggtccctgcgtctctcctgtgcagcctccggattcacctttaacgggtatgggatggcgtgggtccgccaggctccagggaagggtctagagtgggtctcatggattgatgcgtctggtactgagacatactacgcanacaccgtgaagggccggttcaccctctcccgcgacaattccaagaacacgctgtatctgcaaatgaacagcctgcgtgccgaggacaccgcggtatattactgtgcgaaaagtctggggcgttttgactactggggtcagggaaccctggtcaccgtctcgagc

SEQ ID NO: 86 - DNA, 348 bp, Homo sapiens
  misc_feature 187: n = A,T,C or G
gaggtgcagctgttggagtctgggggaggcttggtacagcctggggggtccctgcgtctctcctgtgcagcctccggattcacctttagcgagtatgggatggcgtgggtccgccaggctccagggaagggtctagagtgggtctcatggattgatgcgtctggtactgagacatactacgcagacnacgtgaagggccggttcaccatctcccgcgacaattccaagaacacgctgtatctgcaaatgaacagcctgcgtgccgaggacaccgcggtatattactgtgcgaaaagtctggggcgttttgactactggggtcagggaaccctggtcaccgtctcgagc

SEQ ID NO: 87 - DNA, 348 bp, Homo sapiens
  misc_feature 184: n = A,T,C or G
gaggtgcagctgttggagtctgggggaggcttggtacagcctggggggtccctgcgtctctcctgtgcagcctccggattcacctttggcgcgtatgggatggcgtgggtccgccaggctccagggaagggtctagagtgggtctcatggattgatgcgtctggtactgagacatactacgcanacccggtgaagggccggttcaccatgtcccgcgacaattccaagaacacgctgtatctgcaaatgaacagcctgcgtgccgaggacaccgcggtatattactgtgcgaaaagtctggggcgttttgactactggggtcagggaaccctggtcaccgtctcgagc

SEQ ID NO: 88 - DNA, 348 bp, Homo sapiens
  misc_feature 9, 90, 171, 184: n = A,T,C or G
gaggtgcanctgttggagtctgggggaggcttggtacagcctggggggtccctgcgtctctcctgtgcagcctccggattcacctttcancagtatgggatggcgtgggtccgccaggctccagggaagggtctagagtgggtctcatggattgatgcgtctggtactganacatactacgcanacaccgtgaagggccggttcacctcctcccgcgacaattccaagaacacgctgtatctgcaaatgaacagcctgcgtgccgaggacaccgcggtatattactgtgcgaaaagtctggggcgttttgactactggggtcagggaaccctggtcaccgtctcgagc

SEQ ID NO: 89 - DNA, 348 bp, Homo sapiens
  misc_feature 91, 171, 184: n = A,T,C or G
gaggtgcagctgttggagtctgggggaggcttggtacagcctggggggtccctgcgtctctcctgtgcagcctccggattcacctttttcnactatgggatggggtgggtccgccaggctccagggaagggtctagagtgggtctcatggattgatgcgtctggtactganacatactacgcanaccccgtgaagggccggttcacctcgtcccgcgacaattccaagaacacgctgtatctgcaaatgaacagcctgcgtgccgaggacaccgcggtatattactgtgcgaaaagtctggggcgttttgactactggggtcagggaaccctggtcaccgtctcgagc

SEQ ID NO: 90 - DNA, 348 bp, Homo sapiens
  misc_feature 184: n = A,T,C or G
gaggtgcagctgttggagtctgggggaggcttggtacagcctggggggtccctgcgtctctcctgtgcagcctccggattcacctttcgcgtctatgggatggcgtgggtccgccaggctccagggaagggtctagagtgggtctcatggattgatgcgtctggtactgagacatactacgcanaccccgtgaagggccggttcaccatctcccgcgacaattccaagaacacgctgtatctgcaaatgaacagcctgcgtgccgaggacaccgcggtatattactgtgcgaaaagtctggggcgttttgactactggggtcagggaaccctggtcaccgtctcgagc

SEQ ID NO: 91 - DNA, 348 bp, Homo sapiens
gaggtgcagctgttggagtctgggggaggcttggtacagcctggggggtccctgcgtctctcctgtgcagcctccggattcacctttccctcctatgggatggcgtgggtccgccaggctccagggaagggtctagagtgggtctcatggattgatgcgtctggtactgagacatactacgcagacaccgtgaagggccggttcaccttgtcccgcgacaattccaagaacacgctgtatctgcaaatgaacagcctgcgtgccgaggacaccgcggtatattactgtgcgaaaagtctggggcgttttgactactggggtcagggaaccctggtcaccgtctcgagc

SEQ ID NO: 92 - DNA, 348 bp, Homo sapiens
  misc_feature 184, 228: n = A,T,C or G
gaggtgcagctgttggagtctgggggaggcttggtacagcctggggggtccctgcgtctctcctgtgcagcctccggattcacctttggctcgtatgggatggcgtgggtccgccaggctccagggaagggtctagagtgggtctcatggattgatgcgtctggtactgagacatactacgcanacttggtgaagggccggttcaccatctcccgcgacaattctaanaacacgctgtatctgcaaatgaacagcctgcgtgccgaggacaccgcggtatattactgtgcgaaaagtctggggcgttttgactactggggtcagggaaccctggtcaccgtctcgagc

SEQ ID NO: 93 - DNA, 348 bp, Homo sapiens
  misc_feature 184: n = A,T,C or G
gaggtgcagctgttggagtctgggggaggcttggtacagcctggggggtccctgcgtctctcctgtgcagcctccggattcacctttgaccactatgggatggcgtgggtccgccaggctccagggaagggtctagagtgggtctcatggattgacgcgtctggtactgagacatactacgcanacagcgtgaagggccggttcaccgtgtcccgcgacaattccaagaacacgctgtatctgcaaatgaacagcctgcgtgccgaggacaccgcggtatattactgtgcgaaaagtctggggcgttttgactactggggtcagggaaccctggtcaccgtctcgagc

SEQ ID NO: 94 - DNA, 348 bp, Homo sapiens
gaggtgcagctgttggagtctgggggaggcttggtacagcctggggggtccctgcgtctctcctgtgcagcctccggattcacctttgaccactatgggatggcgtgggtccgccaggctccagggaagggtctagagtgggtctcatggattgatgcgtctggtactgagacatactacgcagacaccgtgaagggccggttcacctcctcccgcgacaattccaagaacgcgctgtatctgcaaatgaacagcctgcgtgccgaggacaccgcggtatattactgtgcgaaaagtctggggcgttttgactactggggtcagggaaccctggtcaccgtctcgagc

SEQ ID NO: 95 - DNA, 348 bp, Homo sapiens
  misc_feature 184: n = A,T,C or G
gaggtgcagctgttggagtctgggggaggcttggtacagcctggggggtccctgcgtctctcctgtgcagcctccggattcacctttttctcctatgggatggcgtgggtccgccaggctccagggaagggtctagagtgggtctcatggattgatgcgtctggtactgagacatactacgcanacccggtgaagggccggttcaccttgtcccgcgacaattccaagaacacgctgtatctgcaaatgaacagcctgcgtgccgaggacaccgcggtatattactgtgcgaaaagtctggggcgttttgactactggggtcagggaaccctggtcaccgtctcgagc

SEQ ID NO: 96 - DNA, 348 bp, Homo sapiens
  misc_feature 184: n = A,T,C or G
gaggtgcagctgttggagtctgggggaggcttggtacagcctggggggtccctgcgtctctcctgtgcagcctccggattcacctttaggggctatgggatggcgtgggtccgccaggctccagggaagggtctagagtgggtctcatggattgatgcgtctggtactgagacatactacgcanacacggtgaagggccggttcaccgtctcccgcgacaattccaagaacacgctgtatctgcaaatgaacagcctgcgtgccgaggacaccgcggtatattactgtgcgaaaagtctggggcgttttgactactggggtcagggaaccctggtcaccgtctcgagc

SEQ ID NO: 97 - DNA, 348 bp, Homo sapiens
  misc_feature 184: n = A,T,C or G
gaggtgcagctgttggagtctgggggaggcttggtacagcctggggggtccctgcgtctctcctgtgcagcctccggattcacctttcgtaattatgggatggcgtgggtccgccaggctccagggaagggtctggagtgggtctcatggattgccgcgcagggtcgggagacatactacgcanacttcgtgaagggccggttcaccatctcccgcgacaattccaagaacacgctgtatctgcaaatgaacagcctgcgtgccgaggacaccgcggtatattactgtgcgaaaagtctggggcgttttgactactggggtcagggaaccctggtcaccgtctcgagc

SEQ ID NO: 98 - DNA, 348 bp, Homo sapiens
gaggtgcagctgttggagtctgggggaggcttggtacagcctggggggtccctgcgtctctcctgtgcagcctccggattcacctttcgtaattatgggatggcgtgggtccgccaggctccagggaagggtctagagtgggtctcatggattgatgcgtctggtactgagacatactacgcagactccgtgaagggccggttcaccatctcccgcgacaattccaagaacacgctgtatctgcaaatgaacagcctgcgtgccgaggataccgcggtatattactgtgcgaaagagctggggcgttttgactactggggtcagggaaccctggtcaccgtctcgagc

SEQ ID NO: 99 - DNA, 348 bp, Homo sapiens
gaggtgcagctgttggagtctgggggaggcttggtacagcctggggggtccctgcgtctctcctgtgcagcctccggattcacctttcgtaattatgggatggcgtgggtccgccaggctccagggaagggtctagagtgggtctcatggattgatgcgtctggtactgagacgtactacgcagactccgtgaagggccggttcaccatctcccgcgacaattccaagaacacgctgtatctgcaaatgaacagcctgcgtgccgaggacaccgcggtatattactgtgcgaaacctctggggcgttttgactactggggtcagggaaccctggtcaccgtctcgagc

SEQ ID NO: 100 - DNA, 348 bp, Homo sapiens
gaggtgcagctgttggagtctgggggaggcttggtacagcctggggggtccctgcgtctctcctgtgcagcctccggattcacctttcgtaattatgggatggcgtgggtccgccaggctccagggaagggtctagagtgggtctcatggattgatgcgtctggtactgagacatactacgcagactccgtgaagggccggttcaccatctcccgcgacaattccaagaacacgctgtatctgcaaatgaacagcctgcgtgccgaggacaccgcggtaattactgtgcgaaatggctggggcgttttgactactggggtcagggaaccctggtcaccgtctcgagcg

SEQ ID NO: 101 - DNA, 348 bp, Homo sapiens
gaggtgcagctgttggagtctgggggaggcttggtacagcctggggggtccctgcgtctctcctgtgcagcctccggattcacctttcgtaattatgggatggcgtgggtccgccaggctccagggaagggtctagagtgggtctcatggattgatgcgtctggtactgagacatactacgcagactccgtgaagggccggttcaccatctcccgcgacaattccaagaacacgctgtatctgcaaatgaacagcctgcgtgccgaggacaccgcggtatattactgtgcgaaaacgttggggcgttttgactactggggtcagggaaccctggtcaccgtctcgagc

SEQ ID NO: 102 - DNA, 348 bp, Homo sapiens
gaggtgcagctgttggagtctgggggaggcttggtacagcctggggggtccctgcgtctctcctgtgcagcctccggattcacctttcgtaattatgggatggcgtgggtccgccaggctccagggaagggtctagagtgggtctcatggattgatgcgtctggtactgagacatactacgcagactccgtgaagggccggttcaccatctcccgcgacaattccaagaacacgctgtatctgcaaatgaacagcctgcgtgccgaggacaccgcggtatattactgtgcgaaagggctggggcgttttgactactggggtcagggaaccctggtcaccgtctcgagc

SEQ ID NO: 103 - DNA, 348 bp, Homo sapiens
gaggtgcagctgttggagtctgggggaggcttggtacagcctggggggtccctgcgtctctcctgtgcagcctccggattcacctttcgtaattatgggatggcgtgggtccgccaggctccagggaagggtctagagtgggtctcatggattgatgcgtctggtactgagacatactacgcagactccgtgaagggccggttcaccatctcccgcgacaattccaagaacacgctgtatctgcaaatgaacagcctgcgtgccgaggacaccgcggtatattactgtgcgaaaagtgaggggcgttttgactactggggtcagggaaccctggtcaccgtctcgagc

SEQ ID NO: 104 - DNA, 348 bp, Homo sapiens
gaggtgcagctgttggagtctgggggaggcttggtacagcctggggggtccctgcgtctctcctgtgcagcctccggattcacctttcgtaattatgggatggcgtgggtccgccaggctccagggaagggtctagagtgggtctcatggattgatgcgtctggtactgagacatactacgcagactccgtgaagggccggttcaccatctcccgcgacaattccaagaacacgctgtatctgcaaatgaacagcctgcgtgccgaggacaccgcggtatattactgtgcgaaaagtcatgggcgttttgactactggggtcagggaaccctggtcaccgtctcgagc

SEQ ID NO: 105 - DNA, 348 bp, Homo sapiens
gaggtgcagctgttggagtctgggggaggcttggtacagcctggggggtccctgcgtctctcctgtgcagcctccggattcacctttcgtaattatgggatggcgtgggtccgccaggctccagggaagggtctagagtgggtctcatggattgatgcgtctggtactgagacatactacgcagactccgtgaagggccggttcaccatctcccgcgacaattccaagaacacgctgtatctgcaaatgaacagcctgcgtgccgaggacaccgcggtatattactgtgcgaaaagttctgggcgttttgactactggggtcagggaaccctggtcaccgtctcgagc

SEQ ID NO: 106 - DNA, 348 bp, Homo sapiens
gaggtgcagctgttggagtctgggggaggcttggtacagcctggggggtccctgcgtctctcctgtgcagcctccggattcacctttcgtaattatgggatggcgtgggtccgccaggctccagggaagggtctagagtgggtctcatggattgatgcgtctggtactgagacatactacgcagactccgtgaagggccggttcaccatctcccgcgacaattccaagaacacgctgtatctgcaaatgaacagcctgcgtgccgaggataccgcggtatattactgtgcgaaaagtgctgggcgttttgactactggggtcagggaaccctggtcaccgtctcgagc

SEQ ID NO: 107 - DNA, 348 bp, Homo sapiens
gaggtgcagctgttggagtctgggggaggcttggtacagcctggggggtccctgcgtctctcctgtgcagcctccggattcacctttcgtaattatgggatggcgtgggtccgccaggctccagggaagggtctagagtgggtctcatggattgatgcgtctggtactgagacatactacgcagactccgtgaagggccggttcaccatctcccgcgacaattccaagaacacgctgtatctgcaaatgaacagcctgcgtgccgaggacaccgcggtatattactgtgcgaaaagtaatgggcgttttgactactggggtcagggaaccctggtcaccgtctcgagc

SEQ ID NO: 108 - DNA, 348 bp, Homo sapiens
gaggtgcagctgttggagtctgggggaggcttggtacagcctggggggtccctgcgtctctcctgtgcagcctccggattcacctttcgtaattatgggatggcgtgggtccgccaggctccagggaagggtctagagtgggtctcatggattgatgcgtctggtactgagacatactacgcagactccgtgaagggccggttcaccatctcccgcgacaattccaagaacacgctgtatctgcaaatgaacagcctgcgtgccgaggataccgcggtatattactgtgcgaaaagtctgcctcgttttgactactggggtcagggaaccctggtcaccgtctcgagc

SEQ ID NO: 109 - DNA, 348 bp, Homo sapiens
gaggtgcagctgttggagtctgggggaggcttggtacagcctggggggtccctgcgtctctcctgtgcagcctccggattcacctttcgtaattatgggatggcgtgggtccgccaggctccagggaagggtctagagtgggtctcatggattgatgcgtctggtactgagacatactacgcagactccgtgaagggccggttcaccatctcccgcgacaattccaagaacacgctgtatctgcaaatgaacagcctgcgtgccgaggacaccgcggtatattactgtgcgaaaagtctggggcgttgggactactggggtcagggaaccctggtcaccgtctcgagc

SEQ ID NO: 110 - DNA, 348 bp, Homo sapiens
gaggtgcagctgttggagtctgggggaggcttggtacagcctggggggtccctgcgtctctcctgtgcagcctccggattcacctttcgtaattatgggatggcgtgggtccgccaggctccagggaagggtctagagtgggtctcatggattgatgcgtctggtactgagacatactacgcagactccgtgaagggccggttcaccatctcccgcgacaattccaagaacacgctgtatctgcaaatgaacagcctgcgtgctgaggacaccgcggtatattactgtgcgaaaagtctggggcgtttggactactggggtcagggaaccctggtcaccgtctcgagc

SEQ ID NO: 111 - DNA, 348 bp, Homo sapiens
gaggtgcagctgttggagtctgggggaggcttggtacagcctggggggtccctgcgtctctcctgtgcagcctccggattcacctttcgtaattatgggatggcgtgggtccgccaggctccagggaagggtctagagtgggtctcatggattgatgcgtctggtactgagacatactacgcagactccgtgaagggccggttcaccatctcccgcgacaattccaagaacacgctgtatctgcaaatgaacagcctgcgtgccgaggacaccgcggtatattactgtgcgaaaagtctggggcgttttccgtactggggtcagggaaccctggtcaccgtctcgagc

SEQ ID NO: 112 - DNA, 348 bp, Homo sapiens
gaggtgcagctgttggagtctgggggaggcttggtacagcctggggggtccctgcgtctctcctgtgcagcctccggattcacctttcgtaattatgggatggcgtgggtccgccaggctccagggaagggtctagagtgggtctcatggattgatgcgtctggtactgagacatactacgcagactccgtgaagggccggttcaccatctcccgcgacaattccaagaacacgctgtatctgcaaatgaacagcctgcgtgccgaggataccgcggtatattactgtgcgaaaagtctggggcgttttgacgtgtggggtcagggaaccctggtcaccgtctcgagc

SEQ ID NO: 113 - DNA, 348 bp, Homo sapiens
gaggtgcagctgttggagtctgggggaggcttggtacagcctggggggtccctgcgtctctcctgtgcagcctccggattcacctttcgtaattatgggatggcgtgggtccgccaggctccagggaagggtctagagtgggtctcatggattgatgcgtctggtactgagacatactacgcagactccgtgaagggccggttcaccatctcccgcgacaattccaagaacacgctgtatctgcaaatgaacagcctgcgtgccgaggacaccgcggtatattactgtgcgaaaagtctgggggggtttgactactggggtcagggaaccctggtcaccgtctcgagc

SEQ ID NO: 114 - DNA, 348 bp, Homo sapiens; identical to SEQ ID NO: 40

SEQ ID NO: 115 - DNA, 348 bp, Homo sapiens
gaggtgcagctgttggagtctgggggaggcttggtacagcctggggggtccctgcgtctctcctgtgcagcctccggattcacctttcgtaattatgggatggcgtgggtccgccaggctccagggaagggtctagagtgggtctcatggattgatgcgtctggtactgagacatactacgcagaccccgtgaagggccggttcaccatctcccgcgacaattccaagaacacgctgtatctgcaaatgaacagcctgcgtgccgaggacaccgcggtatattactgtgcgaaaagtctggggcgttttgactactggggtcagggaaccctggtcaccgtctcgagc

SEQ ID NO: 116 - DNA, 348 bp, Homo sapiens
gaggtgcagctgttggagtctgggggaggcttggtacagcctggggggtccctgcgtctctcctgtgcagcctccggattcacctttcgtaattatgggatggcgtgggtccgccaggctccaggaaagggtctagagtgggtctcatggattgatgcgtctggtactgagacatactacgcagacccggtgaagggccggttcaccttgtcccgcgacaattccaagaacacgctgtatctgcaaatgaacagcctgcgtgccgaggacaccgcggtatattactgtgcgaaaagtctggggcgttttgactactggggtcagggaaccctggtcaccgtctcgagc

SEQ ID NO: 117 - DNA, 348 bp, Homo sapiens
gaggtgcagctgttggactctgggggaggcttggtacagcctggggggtccctgcgtctctcctgtgcagcctccggattcacctttcgtaattatgggatggcgtgggtccgccaggctccagggaagggtctagagtgggtctcatggattgatgcgtctggtactgagacatactacgcagacccggtgaagggccggttcaccttgtcccgcgacaattccaagaacacgctgtatctgcaaatgaacagcctgcgtgccgaggacaccgcggtatattactgtgcgaaaagtctggggcgttttgactactggggtcagggaaccctggtcaccgtctcgagc

SEQ ID NO: 118 - DNA, 348 bp, Homo sapiens
gaggtgcagctgttggactctgggggaggcttggtacagcctggggggtccctgcgtctctcctgtgcagcctccggattcacctttcgtaattatgggatggcgtgggtccgccaggctccagggaagggtctagagtgggtctcatggattgatgcgtctggtactgagacatactacgcagaccccgtgaagggccggttcaccatctcccgcgacaattccaagaacacgctgtatctgcaaatgaacagcctgcgtgccgaggacaccgcggtatattactgtgcgaaaagtctggggcgttttgactactggggtcagggaaccctggtcaccgtctcgagc

SEQ ID NO: 119 - DNA, 348 bp, Homo sapiens
gaggtgcaactgttggagtctgggggaggcttggtacagcctggggggtccctgcgtctctcctgtgcagcctccggattcacctttctccaccacgggatggcgtgggtccgccaggctccagggaagggtctagagtgggtctcatggattgatgcgtctggtactgagacatactacgcagactccgtgaggggccggttcaccatctcccgcgacaattccaagaacacgctgtatctgcaaatgaacagcctgcgtgccgaggacaccgcggtatattactgtgcgaaaagtctggggcgttttgactactggggtcagggaaccctggtcaccgtctcgagc

SEQ ID NO: 120 - DNA, 348 bp, Homo sapiens
gaggtgcagctgttggagtctgggggaggcttggtacagcctggggggtccctgcgtctctcctgtgcagcctccggattcacctttcgtaatcacggcatgggctgggtccgccaggctccagggaagggtctagagtgggtctcatggattgatgcgtctggtactgagacatactacgcagactccgtgaagggccggttcaccatctcccgcgacaattccaagaacacgctgtatctgcaaatgaacagcctgcgtgccgaggacgccgcggtatattactgtgcgaaaagtctggggcgttttgactactggggtcagggaaccctggtcaccgtctcgagc

SEQ ID NO: 121 - DNA, 348 bp, Homo sapiens
gaggtgcagctgttggagtctgggggaggcttggtacagcctggggggtccctgcgtctctcctgtgcagcctccggattcacctttcgtaatttcgggatggggtgggtccgccaggctccagggaagggtctagagtgggtctcatggattgatgcgtctggtactgagacatactacgcagactccgtgaagggccggctcaccatctcccgcgacaattccaagaacacgctgtatctgcaaatgaacagcctgcgtgccgaggacaccgcggtatattactgtgcgaaaagtctggggcgttttgactactggggtcagggaaccctggtcaccgtctcgagc

SEQ ID NO: 122 - DNA, 348 bp, Homo sapiens
gaggtgcagctgttggagtctgggggaggcttggtacagcctggggggtccctgcgtctctcctgtgcagcctccggattcacctttcgtaattatgggatggcgtgggtccgccaggctccagggaagggtctagagtgggtctcatggattctggggtctggtactgagacatactacgcagactccgtgaagggccggttcaccatctcccgcgacaattccaggaacacgctgtatctgcaaatgaacagcctgcgtgccgaggacaccgcggtatattactgtgcgaaaagtctggggcgttttgactactggggtcagggaaccctggtcaccgtctcgagc

SEQ ID NO: 123 - DNA, 348 bp, Homo sapiens
gaggtgcagctgttggagtctgggggaggcttggtacagcctggggggtccctgcgtctctcctgtgcagcctccggattcacctttcgtaattatgggatggcgtgggtccgccaggctccagggaagggtctagagtgggtctcatggattatctcctctggtactgagacatactacgcagactccgtgaagggccggttcaccatctcccgcgacaattccaagaacacgctgtatctgcaaatgaacagcctgcgtgccgaggacaccgcggtatattactgtgcgaaaagtctggggcgttttgactactggggtcagggaaccctggtcaccgtctcgagc

SEQ ID NO: 124 - DNA, 348 bp, Homo sapiens
gaggtgcagctgttggagtctgggggaggcttggtacagcctggggggtccctgcgtctctcctgtgcagcctccggattcacctttcgtaattatgggatggcgtgggtccgccaggctccagggaagggtctagagtgggtctcatggattttgtcctctggtactgagacatactacgcagactccgtgaagggccggttcaccatctcccgcgacaattccaagaacacgctgtatctgcaaatgaacagcctgcgtgccgaggacaccgcggtatattactgtgcgaaaagtctggggcgttttgactactggggtcagggaaccctggtcaccgtctcgagc

SEQ ID NO: 125 - DNA, 348 bp, Homo sapiens
gaggtgcagctgttggagtctgggggaggcttggtacagcctggggggtccctgcgtctctcctgtgcagcctccggattcacctttcgtaattatgggatggcgtgggtccgccaggctccagggaagggtctagagtgggtctcattcattctgccgtctggtactgagacatactacgcagactccgtgaagggccggttcaccatctcccgcgacaattccaagaacacgctgtatctgcaaatgaacagcctgcgtgccgaggacaccgcggtatattactgtgcgaaaagtctggggcgttttgactactggggtcagggaaccctggtcaccgtctcgagc

SEQ ID NO: 126 - DNA, 348 bp, Homo sapiens
gaggtgcagctgttggagtctgggggaggcttggtacagcctggggggtccctgcgtctctcctgtgcagcctccggattcacctttcgtaattatgggatggcgtgggtccgccaggctccagggaagggtctagagtgggtctcatggattcgggggtctggtactgagacatactacgcagactccgtgaagggccggttcaccatctcccgcgacaattccaggaacacgctgtatctgcaaatgaacagcctgcgtgccgaggacaccgcggtatattactgtgcgaaaagtctggggcgttttgactactggggtcagggaaccctggtcaccgtctcgagc

SEQ ID NO: 127 - DNA, 348 bp, Homo sapiens
gaggtgcagctgttggagtctgggggaggcttggtacagcctggggggtccctgcgtctctcctgtgcagcctccggattcacctttcgtaattatgggatggcgtgggtccgccaggctccagggaagggtctagagtgggtctcatggattcgcgggtctggtactgagacatactacgcagactccgtgaagggccggttcaccatctcccgcgacaattccaagaacacgctgtatctgcaaatgaacagcctgcgtgccgaggacaccgcggtatattactgtgcgaaaagtctggggcgttttgactactggggtcagggaaccctggtcaccgtctcgagc

SEQ ID NO: 128 - DNA, 348 bp, Homo sapiens
gaggtgcagctgttggagtctgggggaggcttggtacagcctggggggtccctgcgtctctcctgtgcagcctccggattcacctttcgtaattatgggatggcgtgggtccgccaggctccagggaagggtctggagtgggtctcatggattgatgcgaagggtaaggagacatactacgcagactccgtgaagggccggttcaccatctcccgcgacaattccaagaacacgctgtatctgcaaatgaacagcctgcgtgccgaggacaccgcggtatattactgtgcgaaaagtctggggcgttttgactactggggtcagggaaccctggtcaccgtctcgagc

SEQ ID NO: 129 - DNA, 348 bp, Homo sapiens
gaggtgcagctgttggagtctgggggaggcttggtacagcctggggggtccctgcgtctctcctgtgcagcctccggattcacctttcgtaattatgggatggcgtgggtccgccaggctccagggaagggtctagagtgggtctcatggattgatgcgaagggtagggagacatactacgcagactccgtgaagggccggttcaccatctcccgcgacaattccaagaacacgctgtatctgcaaatgaacagcctgcgtgccgaggacaccgcggtatattactgtgcgaaaagtctggggcgttttgactactggggtcagggaaccctggtcaccgtctcgagc

SEQ ID NO: 130 - DNA, 348 bp, Homo sapiens
gaggtgcagctgttggagtctgggggaggcttggtacagcctggggggtccctgcgtctctcctgtgcagcctccggattcacctttcgtaattatgggatggcgtgggtccgccaggctccagggaagggtctagagtgggtctcatggattgtgggggggggtactgagacatactacgcagactccgtgaagggccggttcaccatctcccgcgacaattccaagaacacgctgtatctgcaaatgaacagcctgcgtgccgaggacaccgcggtatattactgtgcgaaaagtctggggcgttttgactactggggtcagggaaccctggtcaccgtctcgagc

SEQ ID NO: 131 - DNA, 348 bp, Homo sapiens
gaggtgcagctgttggagtctgggggaggcttggtacagcctggagggtccctgcgtctctcctgtgcagcctccggattcacctttcgtaattatgggatggcgtgggtccgccaggctccagggaagggtctagagtgggtctcatggattgagggggggggtactgagacatactacgcagactccgtgaagggccggttcaccatctcccgcgacaattccaagaacacgctgtatctgcaaatgaacagcctgcgtgccgaggacaccgcggtatattactgtgcgaaaagtctggggcgttttgactactggggtcagggaaccctggtcaccgtctcgagc

SEQ ID NO: 132 - DNA, 348 bp, Homo sapiens
gaggtgcagctgttggagtctgggggaggcttggtacagcctggggggtccctgcgtctctcctgtgcagcctccggattcacctttcgtaattatgggatggcgtgggtccgccaggctccagggaagggtctggagtgggtctcatggattgtggggcagggtactgagacatactacgcagactccgtgaagggccggttcaccatctcccgcgacaattccaagaacacgctgtatctgcaaatgaacagcctgcgtgccgaggacaccgcggtatattactgtgcgaaaagtctggggcgttttgactactggggtcagggaaccctggtcaccgtctcgagc

SEQ ID NO: 133 - DNA, 348 bp, Homo sapiens
gaggtgcagctgttggagtctgggggaggcttggtacagcctggggggtccctgcgtctctcctgtgcagcctccggattcacctttcgtaattatgggatggcgtgggtccgccaggctccagggaagggtctagagtgggtctcatggattgtggggtcgggtactgagacatactacgcagactccgtgaagggccggttcaccatctcccgcgacaattccaagaacacgctgtatctgcaaatgaacagcctgcgtgccgaggacaccgcggtatattactgtgcgaaaagtctggggcgttttgactactggggtcagggaaccctggtcaccgtctcgagc

SEQ ID NO: 134 - DNA, 348 bp, Homo sapiens
gaggtgcagctgttggagtctgggggaggcttggtacagcctggggggtccctgcgtctctcctgtgcagcctccggattcacctttcgtaattatgggatggcgtgggtccgccaggctccagggaagggtctagagtgggtctcatggattcacaacaccggtactgagacatactacgcagactccgtgaagggccggttcaccatctcccgcgacaattccaagaacacgctgtatctgcaaatgaacagcctgcgtgccgaggacaccgcggtatattactgtgcgaaaagtctggggcgttttgactactggggtcagggaaccctggtcaccgtctcgagc

SEQ ID NO: 135 - DNA, 348 bp, Homo sapiens
gaggtgcagctgttggagtctgggggaggcttggtacagcctggggggtccctgcgtctctcctgtgcagcctccggattcacctttcacccccacgggatggcgtgggtccgccaggctccagggaagggtctagagtgggtctcatggattgatgcgtctggtactgagacatactacgcagactccgtgaagggccggttcaccatctcccgcgacaattccaagaacacgctgtatctgcaaatgaacagcctgcgtgccgaggacaccgcggtatattactgtgcgaaaagtctggggcgttttgactactggggtcagggaaccctggccaccgtctcgagc

SEQ ID NO: 136 - DNA, 348 bp, Homo sapiens
gaggtgcagctgttggagtctgggggaggcttggtacagcctggggggtccctgcgtctcccctgtgcagcctccggattcacctttcgtaatttcgggatggggtgggtccgccaggctccagggaagggtctagagtgggtctcatggattgatgcgtctggtactgagacatactacgcagactccgtgaagggccggttcaccatctcccgcgacaattccaagaacacgctgtatctgcaaatgaacagcctgcgtgccgaggacaccgcggtatattactgtgcgaaaagtctggggcgttttgactactggggtcagggaaccctggtcaccgtctcgagc

SEQ ID NO: 137 - DNA, 348 bp, Homo sapiens
gaggtgcagctgttggagtctgggggaggcttggtacagcctggggggtccctgcgtctctcctgtgcagcctccggattcacctttcgtaatttcgggatggggtgggtccgccaggctccagggaagggtctagagtgggtctcatggattgatgcgtctggtactgagacatactacgcagactccgtgaagggccggttcaccatctcccgcgacaattccaagaacacgctgtatctgcaaatgaacagcctgcgtgccgaggacaccgcggtatattactgtgcgaaaagtctggggcgttttgactactggggtcagggaaccctggtcaccgtctcgagc

SEQ ID NO: 138 - DNA, 348 bp, Homo sapiens
gaggtgcagctgttggagtctgggggaggcttggtacagcctggggggtccctgcgtctctcctgtgcagcctccggattcacctttcgtaattatgggatggcgtgggtccgccaggctccagggaagggtctagagtgggtctcattcattcactcctctggtactgagacatactacgcagactccgtgaagggccggttcaccatctcccgcgacaattccaagaacacgctgtatctgcaaatgaacagcctgcgtgccgaggacaccgcggtatattactgtgcgaaaagtctggggcgttttgactactggggtcagggaaccctggtcaccgtctcgagc

SEQ ID NO: 139 - DNA, 348 bp, Homo sapiens
gaggtgcagctgttggagtctgggggaggcttggtacagcctggggggtccctgcgtctctcctgtgcagcctccggattcacctttcgtaattatgggatggcgtgggtccgccaggctccagggaagggtctagagtgggtctcatggattgagagctctggtactgagacatactacgcagactccgtgaagggccggttcaccatctcccgcgacaattccaagaacacgctgtatctgcaaatgaacagcctgcgtgccgaggacaccgcggtatattactgtgcgaaaagtctggggcgttttgactactggggtcagggaaccctggtcaccgtctcgagc

SEQ ID NO: 140 - DNA, 348 bp, Homo sapiens
gaggtgcagctgttggagtctgggggaggcttggtacagcctggggggtccctgcgtctctcctgtgcagcctccggattcacctttcgtaattatgggatggcgtgggtccgccaggctccagggaagggtctagagtgggtctcatggattctgaactctggtactgagacatactacgcagactccgtgaagggccggttcaccatctcccgcgacaattccaagaacacgctgtatctgcaaatgaacagcctgcgtgccgaggacaccgcggtatattactgtgcgaaaagtctggggcgttttgactactggggtcagggaaccctggtcaccgtctcgagc

SEQ ID NO: 141 - DNA, 348 bp, Homo sapiens
gaggtgcagctgttggagtctgggggaggcttggtacagcctggggggtccctgcgtctctcctgtgcagcctccggattcacctttcgtaattatgggatggcgtgggtccgccaggctccagggaagggtctagagtgggtctcatggattcagaactctggtactgagacatactacgcagactccgtgaagggccggttcaccatctcccgcgacaattccaagaacacgctgtatctgcaaatgaacagcctgcgtgccgaggacaccgcggtatattactgtgcgaaaagtctggggcgttttgactactggggtcagggaaccctggtcaccgtctcgagc

SEQ ID NO: 142 - DNA, 348 bp, Homo sapiens
gaggtgcagctgttggagtctgggggaggcttggtacagcctggggggtccctgcgtctctcctgtgcagccaccggattcacctttcgtaattatgggatggcgtgggtccgccaggctccagggaagggtctagagtgggtctcatggattgtggggtctggtactgagacatactacgcagactccgtgaagggccggttcaccatctcccgcgacaattccaagaacacgctgtatctgcaaatgaacagcctgcgtgccgaggacaccgcggtatattactgtgcgaaaagtctggggcgttttgactactggggtcagggaaccctggtcaccgtctcgagc

SEQ ID NO: 143 - DNA, 348 bp, Homo sapiens
gaggtgcagctgttggagtctgggggaggcttggtacagcctggggggtccctgcgtctctcctgtgcagcctccggattcacctttcgtaattatgggatggcgtgggtccgccaggctccagggaagggtctagagtgggtctcattcattttgtcctctggtactgagacatactacgcagactccgtgaagggccggttcaccatctcccgcgacaattccaagaacacgctgtatctgcaaatgaacagcctgcgtgccgaggacaccgcggtatattactgtgcgaaaagtctggggcgttttgactactggggtcagggaaccctggtcaccgtctcgagc

SEQ ID NO: 144 - DNA, 348 bp, Homo sapiens
gaggtgcagctgttggagtctgggggaggcttggtacagcctggggggtccctgcgtctcttctgtgcagcctccggattcacctttcgtaattatgggatggcgtgggtccgccaggctccagggaagggtctagagtgggtctcatggattgatgcgaagggtagggagacatactacgcagactccgtgaagggccggttcaccatctcccgcgacaattccaagaacacgctgtatctgcaaatgaacagcctgcgtgccgaggacaccgcggtatattactgtgcgaaaagtctggggcgttttgactactggggtcagggaaccctggtcaccgtctcgagc

SEQ ID NO: 145 - DNA, 348 bp, Homo sapiens
gaggtgcagctgttggagtctgggggaggcttggtacagcctggggggtccctgcgtctctcctgtgcagcctccggattcacctttcgtaattatgggatggcgtgggtccgccaggctccagggaagggtctagagtgggtctcatggattgatgcgaagggtaaggagacatactacgcagactccgtgaagggccggttcaccatctcccgcgacaattccaagaacacgctgtatctgcaaatgaacagcctgcgtgccgaggacaccgcggtatattactgtgcgaaaagtctggggcgttttgactactggggtcagggaaccctggtcaccgcctcgagc

SEQ ID NO: 146 - DNA, 348 bp, Homo sapiens
gaggtgcagctgttggagtctgggggaggcttggtacagcctggggggtccctgcgtctctcctgtgcagcctccggattcacctttcgtaattatgggatggcgtgggtccgccaggctccagggaagggtctagagtgggtctcatggattgaggggcggggtactgagacatactacgcagactccgtgaagggccggttcaccatctcccgcgacaattccaagaacacgctgtatctgcaaatgaacagcctgcgtgccgaggacaccgcggtatattactgtgcgaaaagtctggggcgttttgactactggggtcagggaaccctggtcaccgtctcgagc

SEQ ID NO: 147 - DNA, 348 bp, Homo sapiens
gaggtgcagctgttggagtctgggggaggcttggtacagcctggggggtccctgcgtctctcctgtgcagcctccggattcacctttcgtaattatgggatggcgtgggtccgccaggctccagggaagggtctagagtgggtctcatggattgatgcgtctggtactgagacatactacgcagactccgtgaagggccggttcaccatctcccgcggcaattccaagaacacgctgtatctgcaaatgaacagcctgcgtgccgaggacaccgcggtatattactgtgcgaaaagtctggggcgttttgactactggggtcagggaaccctggtcaccgtctcgagc

SEQ ID NO: 148 - DNA, 348 bp, Homo sapiens
gaggtgcagctgttggagtctgggggaggcttggtacagcctggggggtccctgcgtctctcctgtgcagcctccggattcacctttcgtaattatgggatggcgtgggtccgccaggctccagggaagggtctagagtgggtctcatggattgtgggggggggtactgagacatactacgcagactccgtgaagggccggttcgccatctcccgcgacaattccaagaacacgctgtatctgcaaatgaacagcctgcgtgccgaggacaccgcggtatattactgtgcgaaaagtctggggcgttttgactactggggtcagggaaccctggtcaccgtctcgagc

SEQ ID NO: 149 - DNA, 348 bp, Homo sapiens
gaggtgcagctgttggagtctgggggaggcttggtacagcctggggggtccccgcgtctctcctgtgcagcctccggattcacctttaaggagaacgggatggcgtgggtccgccaggcttcagggaagggtctagagtgggtctcatggattgatgcgtctggtactgagacatactacgcagactccgtgaagggccggttcaccatctcccgcgacaattccaagaacacgctgtatctgcaaatgaacagcctgcgtgccgaggacaccgcggtatattactgtgcgaaaagtctggggcgttttgactactggggtcagggaaccctggtcaccgtctcgagc

SEQ ID NO: 150 - DNA, 348 bp, Homo sapiens
gaggtgcagctgttggagtctgggggaggcttggtacagcctggggggtccctgcgtctctcctgtgcagcctccggattcacctttcgtaattacgggatggggtgggtccgccaggctccagggaagggtctagagtgggtctcatggattgatgcgtctggtactgagacatactacgcagactccgtgaagggccggttcaccatctcccgcgacaattccaagaacacgctgtatctgcaaatgaacagcctgcgtgccgaggacgccgcggtatattactgtgcgaaaagtctggggcgttttgactactggggtcagggaaccctggtcaccgtctcgagc

SEQ ID NO: 151 - DNA, 348 bp, Homo sapiens
gaggtgcagctgttggagtctgggggaggcttggtacagcctggggggtccctgcgtctctcctgtgcagcctccggattcacctttcgtaatttcgggatggggtgggtccgccaggctccagggaagggtctagagtgggtctcatggattgatgcgtctggtactgagacatactacgcagactccgtgaagggccggttcaccatctcccgcgacaattccaagaacacgctgtatctgcaaatgaacagcctgcgtgccgaggacgccgcggtatattactgtgcgaaaagtctggggcgttttgactactggggtcagggaaccctggtcaccgtctcgagc

SEQ ID NO: 152 - DNA, 348 bp, Homo sapiens
gaggtgcagctgttggagtctgggggaggcttggtacagcctggggggtccctgcgtctctcctgtgcagcctccggattcacctttcgtaattatgggatggcgtgggtccgccaggctccagggaagggtctagagtgggtctcattcattctcccctctggtactgagacatactacgcagactccgtgaagggccggttcaccatctcccgcgacaattccaagaacacgctgtatctgcaaatgaacagcctgcgtgccgaggacgccgcggtatattactgtgcgaaaagtctggggcgttttgactactggggtcagggaaccctggtcaccgtctcgagc

SEQ ID NO: 153 - DNA, 348 bp, Homo sapiens
gaggtgcagctgttggagtctgggggaggcttggtacagcctggggggtccctgcgtctctcctgtgcagcctccggattcacctttcgtaattatgggatggcgtgggtccgccaggctccagggaagggtctagagtgggtctcattcattgtcggctctggtactgagacatactacgcagactccgtgaagggccggttcaccatctcccgcgacaattccaagaacacgctgtatctgcaaatgaacagcctgcgtgccgaggacaccgcggtatattactgtgcgaaaagtctggggcgttttgactactggggtcagggaaccctggtcaccgtctcgagc

SEQ ID NO: 154 - DNA, 348 bp, Homo sapiens
gaggtgcagctgttggagtctgggggaggcttggtacagcctggggggtccctgcgtctctcctgtgcagcctccggattcacctttcgtaattatgggatggcgtgggtccgccaggctccagggaagggtctagagtgggtctcatggattacgtggtctggtactgagacatactacgcagactccgtgaagggccggttcaccatctcccgcgacaattccaagaacacgctgtatctgcaaatgaacagcctgcgtgccgaggacaccgcggtatattactgtgcgaaaagtctggggcgttttgactactggggtcagggaaccctggtcaccgtctcgagc

SEQ ID NO: 155 - DNA, 348 bp, Homo sapiens
gaggtgcagctgttggagtctgggggaggcttggtacagcctggggggtccctgcgtctctcctgtgcagcctccggattcacctttcgtaattatgggatggcgtgggtccgccaggctccagggaagggtctagagtgggtctcattcattgtgtcctctggtactgagacatactacgcagactccgtgaagggccggttcaccatctcccgcgacaattccaagaacacgctgtatctgcaaatgaacagcctgcgtgccgaggacaccgcggtatattactgtgcgaaaagtctggggcgttttgactactggggtcagggaaccctggtcaccgtctcgagc

SEQ ID NO: 156 - DNA, 348 bp, Homo sapiens
gaggtgcagctgttggagtctgggggaggcttggtacagcctggggggtccctgcgtctctcctgtgcagcctccggattcacctttcgtaattatgggatggcgtgggtccgccaggctccagggaagggtctagagtgggtctcatggattacgaactctggtactgagacatactacgcagactccgtgaagggccggttcaccatctcccgcgacaattccaagaacacgctgtatctgcaaatgaacagcctgcgtgccgaggacaccgcggtatattactgtgcgaaaagtctggggcgttttgactactggggtcagggaaccctggtcgccgtctcgagc

SEQ ID NO: 157 - DNA, 348 bp, Homo sapiens
gaggtgcagctgttggagtctgggggaggcttggtacagcctggggggtccctgcgtctctcctgtgcagcctccggattcacctttcgtaattatgggatggcgtgggtccgccaggctccagggaagggtctggagtgggtctcatggattttggcgtctggtactgagacatactacgcagactccgtgaagggccggttcaccatctcccgcgacaattccaagaacacgctgtatctgcaaatgaacagcctgcgtgccgaggacaccgcggtatattactgtgcgaaaagtctggggcgttttgactactggggtcagggaaccctggtcaccgtctcgagc

SEQ ID NO: 158 - DNA, 348 bp, Homo sapiens
gaggtgcagctgttggagtctgggggaggcttggtacagcctggggggtccctgcgtctcttctgtgcagcctccggattcacctttcgtaattatgggatggcgtgggtccgccaggctccagggaagggtctagagtgggtctcatggattgatgcgaagggtaacgagacatactacgcagactccgtgaagggccggttcaccatctcccgcgacaattccaagaacacgctgtatctgcaaatgaacagcctgcgtgccgaggacaccgcggtatattactgtgcgaaaagtctggggcgttttgactactggggtcagggaaccctggtcaccgtctcgagc

SEQ ID NO: 159 - DNA, 348 bp, Homo sapiens
gaggtgcagctgttggagtctgggggaggcttggtacagcctggggggtccctgcgtctctcctgtgcagcctccggattcacctttcgtaattatgggatggcgtgggtccgccaggctccagggaagggtctagagtgggtctcatggattgatgcgaagggtaaggagacatactacgcagactccgtgaagggccggttcaccatctcccgcgacaattccaagaacacgctgtatctgcaaatgaacagcctgcgtgccgaggacaccgcggtatattactgtgcgaaaagtctggggcgttttgactactggggtcagggagccctggtcaccgtctcgagc

SEQ ID NO: 160 - DNA, 348 bp, Homo sapiens
gaggtgcagctgttggagtctgggggaggcttggtacagcctggggggtccctgcgtctctcctgtgcagcctccggattcacctttcgtaattatgggatggcgtgggtccgccaggctccagggaagggtctagagtgggtctcatggattgatgcgatgggtaaggagacatactacgcagactccgtgaagggccggttcaccatctcccgcgacaattccaagaacacgctgtatctgcaaatgaacagcctgcgtgccgaggacaccgcggtatattactgtgcgaaaagtctggggcgttttgactactggggtcagggaaccctggtcaccgtctcgagc

SEQ ID NO: 161 - DNA, 348 bp, Homo sapiens
gaggtgcagctgttggagtctgggggaggcttggtacagcctggggggtccctgcgtctctcctgtgcagcctccggattcacctttcgtaattatgggatggcgtgggtccgccaggctccagggaagggtctagagtgggtctcatggattgatgcgtctagtactgagacatactacgcagactccgtgaagggccggttcaccatctcccgcgacaattccaagaacacgctgtatctgcaaatgaacagcctgcgtgccgaggacaccgcggtatattactgtgcgaaaagtctggggcgttttgactactggggtcagggaaccctggtcaccgtctcgagc

SEQ ID NO: 162 - DNA, 348 bp, Homo sapiens
gaggtgcagctgttggagtctgggggaggcttggtacagcctggggggtccctgcgtctctcctgtgcagcctccggattcacctttcgtaatttcgggatggggtgggtccgccaggctccagggaagggtctagagtgggtctcatggattctggggtctggtactgagacatactacgcagactccgtgaagggccggttcaccatctcccgcgacaattccaggaacacgctgtatctgcaaatgaacagcctgcgtgccgaggacaccgcggtatattactgtgcgaaaagtctggggcgttttgactactggggtcagggaaccctggtcaccgtctcgagc

SEQ ID NO: 163 - DNA, 348 bp, Homo sapiens
gaggtgcagctgttggagtctgggggaggcttggtacagcctggggggtccctgcgtctctcctgtgcagcctccggattcacctttcgtaatttcgggatggggtgggtccgccaggctccagggaagggtctagagtgggtctcatggattgtggggtcgggtactgagacatactacgcagactccgtgaagggccggttcaccatctcccgcgacaattccaagaacacgctgtatctgcaaatgaacagcctgcgtgccgaggacaccgcggtatattactgtgcgaaaagtctggggcgttttgactactggggtcagggaaccctggtcaccgtctcgagc

SEQ ID NO: 164 - DNA, 348 bp, Homo sapiens
gaggtgcagctgttggagtctgggggaggcttggtacagcctggggggtccctgcgtctctcctgtgcagcctccggattcacctttcgtaatttcgggatggggtgggtccgccaggctccagggaagggtctagagtgggtctcatggattgagggggggggtactgagacatactacgcagactccgtgaagggccggttcaccatctcccgcgacaattccaagaacacgctgtatctgcaaatgaacagcctgcgtgccgaggacaccgcggtatattactgtgcgaaaagtctggggcgttttgactactggggtcagggaaccctggtcaccgtctcgagc

SEQ ID NO: 165 - DNA, 348 bp, Homo sapiens
gaggtgcagctgttggagtctgggggaggcttggtacagcctggggggtccctgcgtctctcctgtgcagcctccggattcacctttcgtaatttcgggatggggtgggtccgccaggctccagggaagggtctagagtgggtctcatggattatctcctctggtactgagacatactacgcagactccgtgaagggccggttcaccatctcccgcgacaattccaagaacacgctgtatctgcaaatgaacagcctgcgtgccgaggacaccgcggtatattactgtgcgaaaagtctggggcgttttgactactggggtcagggaaccctggtcaccgtctcgggc

SEQ ID NO: 166 - DNA, 348 bp, Homo sapiens
gaagtgcagctgctggaaagcggcggcggcctggtgcagccgggcggcagcctgcgtctgagctgcgcggcgagcggctttacctttggcgataccatgatgggctgggtgcgtcaggcgccgggcaaaggcctggaatgggtgagcgcgattatgcatgatggcgtgcatacctattatgcggatagcgtgaaaggccgttttaccattagccgtgataacagcaaaaacaccctgtatctgcagatgaacagcctgcgtgcggaagataccgcggtgtattattgcgcgaaaagcctgggccgttttgattattggggccagggcaccctggtgaccgtgagcagc

SEQ ID NO: 167 - DNA, 348 bp, Homo sapiens
gaagtgcagctgctggaaagcggcggcggcctggtgcagccgggcggcagcctgcgtctgagctgcgcggcgagcggctttacctttggcgaaaacggcatgggctgggtgcgtcaggcgccgggcaaaggcctggaatgggtgagctatattgaagatgatggcacccatacctattatgcggatagcgtgaaaggccgttttaccattagccgtgataacagcaaaaacaccctgtatctgcagatgaacagcctgcgtgcggaagataccgcggtgtattattgcgcgaaaagctatggcgcgtttgattattggggccagggcaccctggtgaccgtgagcagc

SEQ ID NO: 168 - DNA, 348 bp, Homo sapiens
gaagtgcagctgctggaaagcggcggcggcctggtgcagccgggcggcagcctgcgtctgagctgcgcggcgagcggctttacctttgaatttgcgggcatggcgtgggtgcgtcaggcgccgggcaaaggcctggaatgggtgagcagcattgattgggatggcggcatgacctattatgcggatagcgtgaaaggccgttttaccattagccgtgataacagcaaaaacaccctgtatctgcagatgaacagcctgcgtgcggaagataccgcggtgtattattgcgcgaaacatgaaatggattttgattattggggccagggcaccctggtgaccgtgagcagc

SEQ ID NO: 169 - DNA, 348 bp, Homo sapiens
  misc_feature 166, 167, 168: n = A,T,C or G
gaagtgcagctgctggaaagcggcggcggcctggtgcagccgggcggcagcctgcgtctgagctgcgcggcgagcggctttacctttccggcgaacggcatgggctgggtgcgtcaggcgccgggcaaaggcctggaatgggtgagctatattgatagcaacggcnnnctgacctattatgcggatagcgtgaaaggccgttttaccattagccgtgataacagcaaaaacaccctgtatctgcagatgaacagcctgcgtgcggaagataccgcggtgtattattgcgcgaaaagctatggcgcgtttgattattggggccagggcaccctggtgaccgtgagcagc

SEQ ID NO: 170 - DNA, 348 bp, Homo sapiens
gaagtgcagctgctggaaagcggcggcggcctggtgcagccgggcggcagcctgcgtctgagctgcgcggcgagcggctttacctttgatgaaaccggcatgggctgggtgcgtcaggcgccgggcaaaggcctggaatgggtgagctatattgaaagccatggcatgggcacctattatgcggatagcgtgaaaggccgttttaccattagccgtgataacagcaaaaacaccctgtatctgcagatgaacagcctgcgtgcggaagataccgcggtgtattattgcgcgaaaagctatggcgcgtttgattattggggccagggcaccctggtgaccgtgagcagc

SEQ ID NO: 171 - DNA, 348 bp, Homo sapiens
  misc_feature 154, 155, 156: n = A,T,C or G
gaagtgcagctgctggaaagcggcggcggcctggtgcagccgggcggcagcctgcgtctgagctgcgcggcgagcggctttaccttttttgatcatggcatgggctgggtgcgtcaggcgccgggcaaaggcctggaatgggtgagctatattnnnaccccgggcggcgaaacctattatgcggatagcgtgaaaggccgttttaccattagccgtgataacagcaaaaacaccctgtatctgcagatgaacagcctgcgtgcggaagataccgcggtgtattattgcgcgaaaagctatggcgcgtttgattattggggccagggcaccctggtgaccgtgagcagc

SEQ ID NO: 172 - DNA, 348 bp, Homo sapiens
  misc_feature 292, 293, 294: n = A,T,C or G
gaggtgcagctgttggagtctgggggaggcttggtacagcctggggggtccctgcgtctctcctgtgcagcctccggattcacctttagggatgagcctatggcgtgggtccgccaggctccagggaagggtctagagtgggtctcagatatttctgctgagggtgagactacatactacgcagactccgtgaagggccggttcaccatctcccgcgacaattccaagaacacgctgtatctgcaaatgaacagcctgcgtgccgaggacaccgcggtatattactgtgcgnnnactttgggtacttttgactactggggtcagggaaccctggtcaccgtctcgagc

SEQ ID NO: 173 - DNA, 348 bp, Homo sapiens
gaggtgcagctgttggagtctgggggaggcttggtacagcctggggggtccctgcgtctctcctgtgcagcctccggattcacctttggtgatcatgggatggggtgggtccgccaggctccagggaagggtctagagtgggtctcatatattgggtctacgggtggtcgtacatactacgcagactccgtgaagggccggttcaccatctcccgcgacaattccaagaacacgctgtatctgcaaatgaacagcctgcgtgccgaggacaccgcggtatattactgtgcgaaaagttatggtgcttttgactactggggtcagggaaccctggtcaccgtctcgagc

SEQ ID NO: 174 - DNA, 348 bp, Homo sapiens
gaggtgcagctgttggagtctgggggaggcttggtacagcctggggggtccctgcgtctctcctgtgcagcctccggattcacctttgatgatgagatgatgtcgtgggtccgccaggctccagggaagggtctagagtgggtctcagagattacggctggtggtgttattacatactacgcagactccgtgaagggccggttcaccatctcccgcgacaattccaagaacacgctgtatctgcaaatgaacagcctgcgtgccgaggacaccgcggtatattactgtgcgacaactggttcggattttgactactggggtcagggaaccctggtcaccgtctcgagc

SEQ ID NO: 175 - protein, 116 aa, Homo sapiens
EVQLLESGGGLVQPGGSLRLSCAASGFTFAKYRMAWVRQAPGKGLEWVSSINTLGTTTYYADSVKGRFTISRDNSKNTLYLQMNSLRAEDTAVYYCAKDDPPFDYWGQGTLVTVSS

SEQ ID NO: 176 - protein, 116 aa, Homo sapiens
EVQLLESGGGLVQPGGSLRLSCAASGFTFELYRMAWVRQAPGKGLEWVSQIEPDGGGTYYADSVKGRFTISRDNSKNTLYLQMNSLRAEDTAVYYCAKDEFPFDYWGQGTLVTVSS

SEQ ID NO: 177 - protein, 116 aa, Homo sapiens
EVQLLESGGGLVQPGGSLRLSCAASGFTFKNYAMGWVRQAPGKGLEWVSYIPDHGVDTYYADSVKGRFTISRDNSKNTLYLQMNSLRAEDTAVYYCAKSLGRFDYWGQGTLVTVSS

SEQ ID NO: 178 - protein, 116 aa, Homo sapiens
EVQLLESGGGLVQPGGSLRLSCAASGFTFRDYSMGWVRQAPGKGLEWVSFITQHGRDTYYADSVKGRFTISRDNSENTLYLQMNSLRAEDTAVYYCAKSLSRFDYWGQGTLVTVSS

SEQ ID NO: 179 - protein, 115 aa, Homo sapiens
EVQLLESGGGLVQPGGSLRLSCAASGFTFGRYMMVWVRQAPGKGLEWVSAISPPGDSTYYADSVKGRFTISRDNSKNTLYLQMNSLRAEDTAVYYCAKSLGRFDYWGQGTLVTVR

SEQ ID NO: 180 - protein, 116 aa, Homo sapiens
EVQLLESGGGLVQPGGSLRLSCAASGFTFGLYSMAWVRQAPGKGLEWVSFITSNGRSTYYADSVKGRFTISRDNSKNTLYLQMNSLRAEDTAVYYCAKTLGRFDYWGQGTLVTVSS

SEQ ID NO: 181 - protein, 116 aa, Homo sapiens
EVQLLESGGGLVQPGGSLRLSCAASGFTFGRYMMVWVRQAPGKGLEWVSAISPPGDSTYYADSVKGRFTISRDNSKNTLYLQMNSLRAEDTAVYYCAKSLGRFDYWGQGTLVTVSS

SEQ ID NO: 182 - protein, 116 aa, Homo sapiens
EVQLLESGGGLVQPGGSLRLSCAASGFTFEEYGMAWARQAPGKGLEWVSYIVADGARTYYADSVKGRFTISRDNSKNTLYLQMNSLRAEDTAVYYCAKSLGRFDYWGQGTLVTVSS

SEQ ID NO: 183 - protein, 116 aa, Homo sapiens
EVQLLESGGGLVQPGGSLRLSCAASGFTFMSYQMNWVRQAPGKGLEWVSAISPDGAFTYYADSVKGRFTISRDNSKNTLYLQMNSLRAEDTAVYYCAKSLGRFDYWGQGTLVTVSS

SEQ ID NO: 184 - protein, 116 aa, Homo sapiens
EVQLLESGGGLVQPGGSLRLSCAASGFTFLRYGMGWVRQAPGKGLEWVSWIEPSGHSTYYADSVKGRFTISRDNSKNTLYLQMNSLRAEDTAVYYCAKSYGAFDYWGQGTLVTVSS

SEQ ID NO: 185 - protein, 116 aa, Homo sapiens
EVQLLESGGGLVQPGGSLRLSCAASGFTFGRYDMCWVRQAPGKGLEWVSGIHFDGMETYYADSVKGRFTISRDNSKNTLYLQMNSLRAEDTAVYYCAKDQWPFDYWGQGTLVTVSS

SEQ ID NO: 186 - protein, 116 aa, Homo sapiens
EVQLLESGGGLVQPGGSLRLSCAASGFTFANYGMGWVRQAPGKGLEWVSYISPIGPRTYYADSVKGRFTISRDNSKNTLYLQMNSLRAEDTAVYYCAKSYGAFDYWGQGTLVTVSS

SEQ ID NO: 187 - protein, 116 aa, Homo sapiens
EVQLLESGGGLVQPGGSLRLSCAASGFTFRWYGMGWVRQAPGQGLEWVSYILPGGSETYYADSVKGRFTISRDNSKNTLYLQMNSLRAEDTAVYYCAKSYGAFDYWGQGTLVTVSS

SEQ ID NO: 188 - protein, 116 aa, Homo sapiens
EVQLLESGGGLVQPGGSLRLSCAASGFTFEAYGMGWVRQAPGKGLEWVSFITSSGLSTYYADSVKGRFTISRDNSKNTLYLQMNSLRAEDTAVYYCAKSLGRFDYWGQGTLVTVSS

SEQ ID NO: 189 - protein, 116 aa, Homo sapiens
EVQLLESGGGLVQPGGSLRLSCAASGFTFRDYSMGWVRQAPGKGLEWVSYIETEGRRTYYADSVKGRFTISRDNSKNTLYLQMNSLRAEDTAVYYCAKSLGRFDYWGQGTLVTVSS

SEQ ID NO: 190 - protein, 116 aa, Homo sapiens
EVQLLESGGGLVQPGGSLRLSCAASGFTFSEYSMAWVRQAPGKGLEWVSYIPHDGMRTYYADSVKGRFTISRDNSKNTLYLQMNSLRAEDTAVYYCAKSLSRFDYWGQGTLVTVSS

SEQ ID NO: 191 - protein, 116 aa, Homo sapiens
EVQLLESGGGLVQPGGSLRLSCAASGFTFKQYGMAWVRQAPGKGLEWVSWIDGVGLSTYYADSVKGRFTISRDNSKNTLYLQMNSLRAEDTAVYYCAKSLSRFDYWGQGTLVTVSS

SEQ ID NO: 192 - protein, 116 aa, Homo sapiens
EVQLLESGGGLVQPGGSLRLSCAASGFTFEEYGMGWVRQAPGKGLEWVSWIPEGGRRTYYADSVKGRFTISRDNSKNTLYLQMNSLRAEDTAVYYCAKNYSPFDYWGQGTLVTVSS

SEQ ID NO: 193 - protein, 116 aa, Homo sapiens
EVQLLESGGGLVQPGGSLRLSCAASGFTFAEYSMNWVRQAPGKGLEWVSHINAAGNRTYYADSVKGRFTISRDNSKNTLYLQMNSLRAEDTAVYYCAKSLGRFDYWGQGTLVTVSS

SEQ ID NO: 194 - protein, 116 aa, Homo sapiens
EVQLLESGGGLVQPGGSLRLSCAASGFTFTSYGMGWVRQAPGKGLEWVSYILAAGNATYYADSVKGRFTISRDNSKNTLYLQMNSLRAEDTAVYYCAKSYGAFDYWGQGTLVTVSS

SEQ ID NO: 195 - protein, 116 aa, Homo sapiens
EVQLLESGGGLVQPGGSLRLSCAASGFTFQSYAMGWVRQAPGKGLEWVSYISPTGHHTYYADSVKGRFTISRDNSKNTLYLQMNSLRAEDTAVYYCAKSLGRFDYWGQGTPVTVSS

SEQ ID NO: 196 - protein, 116 aa, Homo sapiens
EVQLLESGGGLVQPGGSLRLSCAASGFTFVSYPMGWVRQAPGKGLEWVSWIPGDGSATYYADSVKGRFTISRDNSKNTLYLQMNSLRAEDTAVYYCAKSLSRFDYWGQGTLVTVSS

SEQ ID NO: 197 - protein, 116 aa, Homo sapiens
EVQLLESGGGLVQPGGSLRLSCAASGFTFNHYGMGWVRQAPGKGLEWVSYITFPGLQTYYADSVKGRFTISRDNSKNTLYLQMNSLRAEDTAVYYCAKSYGAFDYWGQGTLVTVSS

SEQ ID NO: 198 - protein, 116 aa, Homo sapiens
EVQLLESGGGLVQPGGSLRLSCAASGFTFMYYGMGWVRQAPGKGLEWVSWITANGSSTYYADSVKGRFTISRDNSKNTLYLQMNSLRAEDTAVYYCAKSLGRFDYWGQGTLVTVSS

SEQ ID NO: 199 - protein, 116 aa, Homo sapiens
EVQLLESGGGLVQPGGSLRLSCAASGFTFRNYGMAWVRQAPGKGLEWVSWIDASGTETYYADSVKGRFTISRDNSKNTLYLQMNSLRAEDTAVYYCAKSLGRFDYWGQGTLVTVSS

SEQ ID NO: 200 - protein, 116 aa, Homo sapiens
EVQLLESGGGLVQPGGSLRLSCAASGFTFRNYGMAWVRQAPGKGLEWVSWIDASGTETYYADSVKGRFTISRDNSKNTLYLQMNSLRAEDTAVYYCAKSLGRFDYWGQGTPVTVSS

SEQ ID NO: 201 - protein, 116 aa, Homo sapiens
EVQLLESGGGLVQPGGSLRLSCAASGFTFRNYGMAWVRQAPGKGLEWVSWIDASGTETYYSSSVKGRFTISRDNSKNTLYLQMNSLRAEDTAVYYCAKSLGRFDYWGQGTLVTVSS

SEQ ID NO: 202 - protein, 116 aa, Homo sapiens
EVQLLESGGGLVQTGGSLRLSCAASGFTFRNYGMAWVRQAPGKGLEWVSWIDASGTETYYADSVKGRFTISRDNSKNTLYLQMNSLRAEDTAVYYCAKSLGRFDYWGQGTLVTVSS

SEQ ID NO: 203 - protein, 116 aa, Homo sapiens
EVQLLESGGGLVQPGGSLRLSCAASGFTFRNYGTAWVRQAPGKGLEWVSWIDASGTETYYADSVKGRFTISRDNSKNTLYLQMNSLRAEDTAVYYCAKSLGRFDYWGQGTLVTVSS

SEQ ID NO: 204 - protein, 116 aa, Homo sapiens
EVQLLESGGGLVQPGGSLRLSCAASGFTFRNYGMAWVRQAPGKGLEWVSWIDASGTETYYADPVKGRITISRDNSKNTLYLQMNSLRAEDTAVYYCAKSLGRFDYWGQGTLVTVSS

SEQ ID NO: 205 - protein, 116 aa, Homo sapiens
EVQLSESGGGLVQPGGSLRLSCAASGFTFRNYGMAWVRQAPGKGLEWVSWIDASGTETYYADSVKGRFTISRDNSKNTLYLQMNSLRAEDTAVYYCAKSLGRFDYWGQGTLVTVSS

SEQ ID NO: 206 - protein, 116 aa, Homo sapiens
EVQLLESGGGLVQPGGSLRLSCAVSGFTFRNYGMAWVRQAPGKGLEWVSWIDASGTETYYADSVKGRFTISRDNSKNTLYLQMNSLRAEDTAVYYCAKSLGRFDYWGQGTLVTVSS

SEQ ID NO: 207 - protein, 116 aa, Homo sapiens
EVQLLESGGGLVRPGGSLRLSCAASGFTFRNYGMAWVRQAPGKGLEWVSWIDASGTETYYADSVKGRFTISRDNSKNTLYLQMNSLRAEDTAVYYCAKSLGRFDYWGQGTLVTVSS

SEQ ID NO: 208 - protein, 116 aa, Homo sapiens
  VARIANT 30, 65: Xaa = Any Amino Acid
EVQLLESGGGLVQPGGSLRLSCAASGFTFXNYGMAWVRQAPGKGLEWVSWIYASGTETYYADSVXGRFTISRDNSKNTLYLQMNSLRAEDTAVYYCAKSLGRFDYWGQGNPGHLSS

SEQ ID NO: 209 - protein, 116 aa, Homo sapiens
EVQLLESGGGLVQPGGSLRLSCAASGFTFRNYGMAWVRQAPGKGLEWVSWIDASGTETYYADSVKGRFTFSRDNSKNTLYLQMNSLRAEDTAVYYCAKSLGRFDYWGQGTLVTVSS

SEQ ID NO: 210 - protein, 116 aa, Homo sapiens
EVQLLESGGGLVQPGGSLRLSCAASGFTFRNYGMAWVRQAPGKGLEWVSWIDASGTETYYADSVKGRLTISRDNSKNTLYLQMNSLRAEDTAVYYCAKSLGRFDYWGQGTLVTVSS

SEQ ID NO: 211 - protein, 116 aa, Homo sapiens
EVQLLESGGGLVQPGGSLRLSCAASGFTFRNYGMAWVRQAPGKGLEWVSWIDASGTETYYADAVKGRFTISRDNSKNTLYLQMNSLRAEDTAEYYCAKSLGRFDYWGQGTLVTVSS

SEQ ID NO: 212 - protein, 116 aa, Homo sapiens
EVQLLESGGGLVQPGGPLRLSCAASGFTFRNYGMAWVRQAPGKGLEWVSWIDASGTETYYADSVKGRFTISRDNSKNTLYLQMNSLRAEDTAVYYCAKSLGRFDYWGQGTLVTVSS

SEQ ID NO: 213 - protein, 116 aa, Homo sapiens
EVQLLESGGGLVQPGGSLRLSCAASGFTFRNYGMAWVRQAPGKGLEWVSWIDASGTETYYATSVKGRFTISRDNSKNTLYLQMNSLRAEDTAVYYCAKSLGRFDYWGQGTLVTVSS

SEQ ID NO: 214 - protein, 116 aa, Homo sapiens
EVQLLDSGGGLVQPGGSLRLSCAASGFTFRNYGMAWVRQAPGKGLEWVSWIDASGTETYYADSVKGRFTISRDNSKNTLYLQMNSLRAEDTAVYYCAKSLGRFDYWGQGTLVTVSS

SEQ ID NO: 215 - protein, 116 aa, Homo sapiens
EVQLLESGGGLVQPGGSLRLSCAASGFTFRNYGMAWVRQAPGKGLEWVSWIDASGTETYYADSVKGRFTISRDNYKNTLYLQMNSLRAEDTAVYYCAKSLGRFDYWGQGTQVTVSS

SEQ ID NO: 216 - protein, 116 aa, Homo sapiens
  VARIANT 106, 109: Xaa = Any Amino Acid
EVQLLDSGGGLVQPGGSLRLSCAASGFTFRNYGMAWVRQAPGKGLEWVSWIDASGTETYYADSVKGRFTISRDNSKNTLYLQMNSLRAEDTAVYYCAKSLGRFDYXGQXTLVTVSS

SEQ ID NO: 217 - protein, 116 aa, Homo sapiens
EVQLLESGGGSVQPGGSLRLSCAASGFTFRNYGMAWVRQAPGKGLEWVSWIDASGTETYYADSVKGRFTISRDNSKNTLYLQMNSLRAEDTAVYYCAKSLGRFDYWGQGTLVLLSS

SEQ ID NO: 218 - protein, 116 aa, Homo sapiens
EVQLLESRGGLVQPGGSLRLSCAASGFTFRNYGMAWVRQAPGKGLEWVSWIDASGTETYYADSVKGRFTISRDNSKNTLYLQMNSLRAEDTAVYYCAKSLGRFDYWGQGTLVTVSS

SEQ ID NO: 219 - protein, 116 aa, Homo sapiens
EVQLLESEGGLVQPGGSLRLSCAASGFTFRNYGMAWVRQAPGKGLEWVSWIDASGTETYYADSVKGRFTISRDNSKNTLYLQMNSLRAEDTAVYYCAKSLGRFDYWGQGTLVTVSS

SEQ ID NO: 220 - protein, 116 aa, Homo sapiens
EVQLLEYGGGLVQPGGSLRLSCAASGFTFRNYGMAWVRQAPGKGLEWVSWIDASGTETYYADSVKGRFTISRDNSKNTLYLQMNSLRAEDTAVYYCAKSLGRFDYWGKGTLVTVSS

SEQ ID NO: 221 - protein, 116 aa, Homo sapiens
EVQLLESWGGLVQPGGSLRLSCAASGFTFRNYGMAWVRQAPGKGLEWISWIDASGTETYYADPVKGRFTISRDNSKNTLYLQMNSLRAEDTAVYYCAKSLGRFDYWGQGTLVTVSS

SEQ ID NO: 222 - protein, 116 aa, Homo sapiens
EVQLLESGGGLVQPGGSLRLSCAASGYTFRNYGMAWVRQAPGKGLEWVSWIDASGTETYYADSVKGRFTISRDNSKNTLYLQMNSLRAEDTAVYYCAKSLGRFDYWGQGTLVTVSS

SEQ ID NO: 223 - protein, 116 aa, Homo sapiens
  VARIANT 7: Xaa = Any Amino Acid
EVQLLEXGGGLVQPGGSLRLSCTASGFTFRNYGMAWVRQAPGKGLEWVSWIDASGTETYYADSVKGRFTISRDNSKNTLYLQMNSLRAEDTAVYYCAKSLGRFDYWGQGTLVTVSS

SEQ ID NO: 224 - protein, 116 aa, Homo sapiens
EVQLLESGGGLVQPGGSLRLSCAASGFTFRNYGMAWVRQAPGKGLEWVSWIGQYGDETYYADFVKGRFTISRDNSKNTLYLQMNSLRAEDTAVYYCAKSLGRFDYWGQGTLVTVSS

SEQ ID NO: 225 - protein, 116 aa, Homo sapiens
  VARIANT 62: Xaa = Any Amino Acid
EVQLLESGGGLVQPGGSLRLSCAASGFTFRNYGMAWVRQAPGKGLEWVSWISPYGRETYYAXFVKGRFTISRDNSKNTLYLQMNSLRAEDTAVYYCAKSLGRFDYWGQGTLVTVSS

SEQ ID NO: 226 - protein, 116 aa, Homo sapiens
  VARIANT 62: Xaa = Any Amino Acid
EVQLLESGGGLVQPGGSLRLSCAASGFTFRNYGMAWVRQAPGKGLEWVSWIAGSGRETYYAXFVKGRFTISRDNSKNTLYLQMNSLRAEDTAVYYCAKSLGRFDYWGQGTLVTVSS

SEQ ID NO: 227 - protein, 116 aa, Homo sapiens
  VARIANT 62: Xaa = Any Amino Acid
EVQLLESGGGLVQPGGSLRLSCAASGFTFRNYGMAWVRQAPGKGLEWVSWIAGPGTETYYAXFVKGRFTISRDNSKNTLYLQMNSLRAEDTAVYYCAKSLGRFDYWGQGTLVTVSS

SEQ ID NO: 228 - protein, 116 aa, Homo sapiens
  VARIANT 57, 62: Xaa = Any Amino Acid
EVQLLESGGGLVQPGGSLRLSCAASGFTFDQYGMAWVRQAPGKGLEWVSWIDASGTXTYYAXTVKGRFTLSRDNSKNTLYLQMNSLRAEDTAVYYCAKSLGRFDYWGQGTLVTVSS

SEQ ID NO: 229 - protein, 116 aa, Homo sapiens
  VARIANT 62: Xaa = Any Amino Acid
EVQLLESGGGLVQPGGSLRLSCAASGFTFWLYGMAWVRQAPGKGLEWVSWIDASGTETYYAXSVKGRFTISRDNSKNALYLQMNSLRAGDTAVYYCAKSLGRFDYWGQGTLVTVSS

SEQ ID NO: 230 - protein, 116 aa, Homo sapiens
  VARIANT 62: Xaa = Any Amino Acid
EVQLLESGGGLVQPGGSLRLSCAASGFTFGYYGMAWVRQAPGKGLEWVSWIDASGTETYYAXHVKGRFTLSRDNSKNTLYLQMNSLRAEDTAVYYCAKSLGRFDYWGQGTLVTVSS

SEQ ID NO: 231 - protein, 116 aa, Homo sapiens
  VARIANT 62: Xaa = Any Amino Acid
EVQLLESGGGLVQPGGSLRLSCAASGFTFFGYGMAWVRQAPGKGLEWVSWIDASGTETYYAXRVKGRFTVSRDNSKNTLYLQMNSLRAEDTAVYYCAKSLGRFDYWGQGTLVTVSS

SEQ ID NO: 232 - protein, 116 aa, Homo sapiens
  VARIANT 3, 62, 76: Xaa = Any Amino Acid
EVXLLESGGGLVQPGGSLRLSCAASGFTFSDYGMAWVRQAPGKGLEWVSWIDASGTETYYAXPVKGRFTLSRDNSXNTLYLQMNSLRAEDTAVYYCAKSLGRFDYWGQGTLVTVSS

SEQ ID NO: 233 - protein, 116 aa, Homo sapiens
  VARIANT 62: Xaa = Any Amino Acid
EVQLLESGGGLVQPGGSLRLSCAASGFTFFLYGMAWVRQAPGKGLEWVSWIDASGTETYYAXPVKGRFTISRDNSKNTLYLQMNSLRAEDTAVYYCAKSLGRFDYWGQGTLVTVSS

SEQ ID NO: 234 - protein, 116 aa, Homo sapiens
  VARIANT 3, 30, 62, 76: Xaa = Any Amino Acid
EVXLLESGGGLVQPGGSLRLSCAASGFTFXYYGMAWVRQAPGKGLEWVSWIDASGTETYYAXKVKGRFTLSRDNSXNTLYLQMNSLRAEDTAVYYCAKSLGRFDYWGQGTLVTVSG

SEQ ID NO: 235 - protein, 116 aa, Homo sapiens
  VARIANT 62: Xaa = Any Amino Acid
EVQLLESGGGLVQPGGSLRLSCAASGFTFSNYGMAWVRQAPGKGLEWVSWIDASGTETYYAXMVKGRFTVSRDNSKNTLYLQMNSLRAEDTAVYYCAKSLGRFDYWGQGTLVTVSS

SEQ ID NO: 236 - protein, 116 aa, Homo sapiens
  VARIANT 62: Xaa = Any Amino Acid
EVQLLESGGGLVQPGGSLRLSCAASGFTFGEYGMAWVRQAPGKGLEWVSWIDASGTETYYAXPVKGRFTLSRDNSKNALYLQMNSLRAEDTAVYYCAKSLGRFDYWGQGTLVTVSS

SEQ ID NO: 237 - protein, 116 aa, Homo sapiens
  VARIANT 62: Xaa = Any Amino Acid
EVQLLESGGGLVQPGGSLRLSCAASGFTFKHYGMAWVRQAPGKGLEWVSWIDASGTETYYAXSVKGRFTLSRDNSKNTLYLQMNSLRAEDTAVYYCAKSLGRFDYWGQGTLVTVSS

SEQ ID NO: 238 - protein, 116 aa, Homo sapiens
  VARIANT 57, 62, 63: Xaa = Any Amino Acid
EVQLLESGGGLVQPGGSLRLSCAASGFTFPYYGMAWVRQAPGKGLEWVSWIDASGTXTYYAXXVKGRFTLSRDNSKNTLYLQMNSLRAEDTAVYYCAKSLGRFDYWGQGTLVTVSS

SEQ ID NO: 239 - protein, 116 aa, Homo sapiens
EVQLLESGGGLVQPGGSLRLSCAASGFTFRKYGMAWVRQAPGKGLEWVSWIDASGTETYYADTVKGRFTISRDNSKNTLYLQMNSLRAEDTAVYYCAKSLGRFDYWGQGTLVTVSS

SEQ ID NO: 240 - protein, 116 aa, Homo sapiens
  VARIANT 62: Xaa = Any Amino Acid
EVQLLESGGGLVQPGGSLRLSCAASGFTFLMYGMAWVRQAPGKGLEWVSWIDASGTETYYAXPVKGRFTISRDNSKNTLYLQMNSLRAEDTAVYYCAKSLGRFDYWGQGTLVTVSS

SEQ ID NO: 241 - protein, 116 aa, Homo sapiens
  VARIANT 3: Xaa = Any Amino Acid
EVXLLESGGGLVQPGGSLRLSCAASGFTFNNYGMAWVRQAPGKGLEWVSWIDASGTETYYADTVKGRFTMSRDNSKNTLYLQMNSLRAEDTAVYYCAKSLGRFDYWGQGTLVTVSS

SEQ ID NO: 242 - protein, 116 aa, Homo sapiens
  VARIANT 62, 63: Xaa = Any Amino Acid
EVQLLESGGGLVQPGGSLRLSCAASGFTFGEYGMAWVRQAPGKGLEWVSWIDASGTETYYAXXVKGRFTISRDNSKNTLYLQMNSLRAEDTAVYYCAKSLGRFDYWGQGTLVTVSS

SEQ ID NO: 243 - protein, 116 aa, Homo sapiens
  VARIANT 3, 52, 62: Xaa = Any Amino Acid
EVXLLESGGGLVQPGGSLRLSCAASGFTFRNYGMAWVRQAPGKGLEWVSWIXGSGRETYYAXFVKGRFTISRDNSKNTLYLQMNSLRAEDTAVYYCAKSLGRFDYWGQGTLVTVSS

SEQ ID NO: 244 - protein, 116 aa, Homo sapiens
  VARIANT 57, 62: Xaa = Any Amino Acid
EVQLLESGGGLVQPGGSLRLSCAASGFTFRNYGMAWVRQAPGKGLEWVSWISGRGYXTYYAXFVKGRFTISRDNSKNTLYLQMNSLRAEDTAVYYCAKSLGRFDYWGQGTLVTVSS

SEQ ID NO: 245 - protein, 116 aa, Homo sapiens
  VARIANT 62: Xaa = Any Amino Acid
EVQLLESGGGLVQPGGSLRLSCAASGFTFRNYGMAWVRQAPGKGLEWVSWISSSGGETYYAXFVKGRFTISRDNSKNTLYLQMNSLRAEDTAVYYCAKSLGRFDYWGQGTLVTVSS

SEQ ID NO: 246 - protein, 116 aa, Homo sapiens
  VARIANT 53: Xaa = Any Amino Acid
EVQLLESGGGLVQPGGSLRLSCAASGFTFRNYGMAWVRQAPGKGLEWVSWISXNGRETYYADFVKGRFTISRDNSKNTLYLQMNSLRAEDTAVYYCAKSLGRFDYWGQGTLVTVSS

SEQ ID NO: 247 - protein, 116 aa, Homo sapiens
  VARIANT 62: Xaa = Any Amino Acid
EVQLLESGGGLVQPGGSLRLSCAASGFTFRNYGMAWVRQAPGKGLEWVSWISGKGLETYYAXFVKGRFTISRDNSKNTLYLQMNSLRAEDTAVYYCAKSLGRFDYWGQGTLVTVSS

SEQ ID NO: 248 - protein, 116 aa, Homo sapiens
  VARIANT 62: Xaa = Any Amino Acid
EVQLLESGGGLVQPGGSLRLSCAASGFTFRNYGMAWVRQAPGKGLEWVSWIQANGGETYYAXFVKGRFTISRDNSKNTLYLQMNSLRAEDTAVYYCAKSLGRFDYWGQGTLVTVSS

SEQ ID NO: 249 - protein, 116 aa, Homo sapiens
  VARIANT 62: Xaa = Any Amino Acid
EVQLLESGGGLVQPGGSLRLSCAASGFTFRNYGMAWVRQAPGKGLEWVSWIHSSGSETYYAXFVKGRFTISRDNSKNTLYLQMNSLRAEDTAVYYCAKSLGRFDYWGQGTLVTVSS

SEQ ID NO: 250 - protein, 116 aa, Homo sapiens
  VARIANT 62: Xaa = Any Amino Acid
EVQLLESGGGLVQPGGSLRLSCAASGFTFRNYGMAWVRQAPGKGLEWVSWIDGRGSETYYAXFVKGRFTISRDNSKNTLYLQMNSLRAEDTAVYYCAKSLGRFDYWGQGTLVTVSS

SEQ ID NO: 251 - protein, 116 aa, Homo sapiens
  VARIANT 62: Xaa = Any Amino Acid
EVQLLESGGGLVQPGGSLRLSCAASGFTFRNYGMAWVRQAPGKGLEWVSWINGRGSETYYAXFVKGRFTISRDNSKNTLYLQMNSLRAEDTAVYYCAKSLGRFDYWGQGTLVTVSS

SEQ ID NO: 252 - protein, 116 aa, Homo sapiens
  VARIANT 62: Xaa = Any Amino Acid
EVQLLESGGGLVQPGGSLRLSCAASGFTFRNYGMAWVRQAPGKGLEWVSWISGRGSETYYAXFVKGRFTISRDNSKNTLYLQMNSLRAEDTAVYYCAKSLGRFDYWGQGTLVTVSS

SEQ ID NO: 253 - protein, 116 aa, Homo sapiens
  VARIANT 3, 62: Xaa = Any Amino Acid
EVXLLESGGGLVQPGGSLRLSCAASGFTFRNYGMAWVRQAPGKGLEWVSWIHSLGGETYYAXFVKGRFTISRDNSKNTLYLQMNSLRAEDTAVYYCAKSLGRFDYWGQGTLVTVSS

SEQ ID NO: 254 - protein, 116 aa, Homo sapiens
  VARIANT 62: Xaa = Any Amino Acid
EVQLLESGGGLVQPGGSLRLSCAASGFTFRNYGMAWVRQAPGKGLEWVSWIAGNGQETYYAXFVKGRFTISRDNSKNTLYLQMNSLRAEDTAVYYCAKSLGRFDYWGQGTLVTVSS

SEQ ID NO: 255 - protein, 116 aa, Homo sapiens
EVQLLESGGGLVQPGGSLRLSCAASGFTFRNYGMAWVRQAPGKGLEWVSWINSNGRETYYADFVKGRFTISRDNSKNTLYLQMNSLRAEDTAVYYCAKSLGRFDYWGQGTLVTVSS

SEQ ID NO: 256 - protein, 116 aa, Homo sapiens
  VARIANT 62: Xaa = Any Amino Acid
EVQLLESGGGLVQPGGSLRLSCAASGFTFRNYGMAWVRQAPGKGLEWVSWIDGYGKETYYAXFVKGRFTISRDNSKNTLYLQMNSLRAEDTAVYYCAKSLGRFDYWGQGTLVTVSS

SEQ ID NO: 257 - protein, 116 aa, Homo sapiens
  VARIANT 62: Xaa = Any Amino Acid
EVQLLESGGGLVQPGGPLRLSCAASGFTFRTYGMAWVRQAPGKGLEWVSWIDASGTETYYAXNVKGRFTISRDNSKNTLYLQMNSLRAEDTAVYYCAKSLGRFDYWGQGTLVTVSS

SEQ ID NO: 258 - protein, 116 aa, Homo sapiens
  VARIANT 62: Xaa = Any Amino Acid
EVQLLESGGGLVQPGGSLRLSCAASGFTFWYYGMAWVRQAPGKGLEWVSWIDASGTETYYAXTVKGRFTLSRDNSKNTLYLQMNSLRAEDTAVYYCAKSLGRFDYWGQGTLVTVSS

SEQ ID NO: 259 - protein, 116 aa, Homo sapiens
  VARIANT 62: Xaa = Any Amino Acid
EVQLLESGGGLVQPGGSLRLSCAASGFTFNGYGMAWVRQAPGKGLEWVSWIDASGTETYYAXTVKGRFTLSRDNSKNTLYLQMNSLRAEDTAVYYCAKSLGRFDYWGQGTLVTVSS

SEQ ID NO: 260 - protein, 116 aa, Homo sapiens
  VARIANT 63: Xaa = Any Amino Acid
EVQLLESGGGLVQPGGSLRLSCAASGFTFSEYGMAWVRQAPGKGLEWVSWIDASGTETYYADXVKGRFTISRDNSKNTLYLQMNSLRAEDTAVYYCAKSLGRFDYWGQGTLVTVSS

SEQ ID NO: 261 - protein, 116 aa, Homo sapiens
  VARIANT 62: Xaa = Any Amino Acid
EVQLLESGGGLVQPGGSLRLSCAASGFTFGAYGMAWVRQAPGKGLEWVSWIDASGTETYYAXPVKGRFTMSRDNSKNTLYLQMNSLRAEDTAVYYCAKSLGRFDYWGQGTLVTVSS

SEQ ID NO: 262 - protein, 116 aa, Homo sapiens
  VARIANT 3, 30, 57, 62: Xaa = Any Amino Acid
EVXLLESGGGLVQPGGSLRLSCAASGFTFXQYGMAWVRQAPGKGLEWVSWIDASGTXTYYAXTVKGRFTSSRDNSKNTLYLQMNSLRAEDTAVYYCAKSLGRFDYWGQGTLVTVSS

SEQ ID NO: 263 - protein, 116 aa, Homo sapiens
  VARIANT 31, 57, 62: Xaa = Any Amino Acid
EVQLLESGGGLVQPGGSLRLSCAASGFTFFXYGMGWVRQAPGKGLEWVSWIDASGTXTYYAXPVKGRFTSSRDNSKNTLYLQMNSLRAEDTAVYYCAKSLGRFDYWGQGTLVTVSS

SEQ ID NO: 264 - protein, 116 aa, Homo sapiens
  VARIANT 62: Xaa = Any Amino Acid
EVQLLESGGGLVQPGGSLRLSCAASGFTFRVYGMAWVRQAPGKGLEWVSWIDASGTETYYAXPVKGRFTISRDNSKNTLYLQMNSLRAEDTAVYYCAKSLGRFDYWGQGTLVTVSS

SEQ ID NO: 265 - protein, 116 aa, Homo sapiens
EVQLLESGGGLVQPGGSLRLSCAASGFTFPSYGMAWVRQAPGKGLEWVSWIDASGTETYYADTVKGRFTLSRDNSKNTLYLQMNSLRAEDTAVYYCAKSLGRFDYWGQGTLVTVSS

SEQ ID NO: 266 - protein, 116 aa, Homo sapiens
  VARIANT 62, 76: Xaa = Any Amino Acid
EVQLLESGGGLVQPGGSLRLSCAASGFTFGSYGMAWVRQAPGKGLEWVSWIDASGTETYYAXLVKGRFTISRDNSXNTLYLQMNSLRAEDTAVYYCAKSLGRFDYWGQGTLVTVSS

SEQ ID NO: 267 - protein, 116 aa, Homo sapiens
  VARIANT 62: Xaa = Any Amino Acid
EVQLLESGGGLVQPGGSLRLSCAASGFTFDHYGMAWVRQAPGKGLEWVSWIDASGTETYYAXSVKGRFTVSRDNSKNTLYLQMNSLRAEDTAVYYCAKSLGRFDYWGQGTLVTVSS

SEQ ID NO: 268 - protein, 116 aa, Homo sapiens
EVQLLESGGGLVQPGGSLRLSCAASGFTFDHYGMAWVRQAPGKGLEWVSWIDASGTETYYADTVKGRFTSSRDNSKNALYLQMNSLRAEDTAVYYCAKSLGRFDYWGQGTLVTVSS

SEQ ID NO: 269 - protein, 116 aa, Homo sapiens
  VARIANT 62: Xaa = Any Amino Acid
EVQLLESGGGLVQPGGSLRLSCAASGFTFFSYGMAWVRQAPGKGLEWVSWIDASGTETYYAXPVKGRFTLSRDNSKNTLYLQMNSLRAEDTAVYYCAKSLGRFDYWGQGTLVTVSS

SEQ ID NO: 270 - protein, 116 aa, Homo sapiens
  VARIANT 62: Xaa = Any Amino Acid
EVQLLESGGGLVQPGGSLRLSCAASGFTFRGYGMAWVRQAPGKGLEWVSWIDASGTETYYAXTVKGRFTVSRDNSKNTLYLQMNSLRAEDTAVYYCAKSLGRFDYWGQGTLVTVSS

SEQ ID NO: 271 - protein, 116 aa, Homo sapiens
  VARIANT 62: Xaa = Any Amino Acid
EVQLLESGGGLVQPGGSLRLSCAASGFTFRNYGMAWVRQAPGKGLEWVSWIAAQGRETYYAXFVKGRFTISRDNSKNTLYLQMNSLRAEDTAVYYCAKSLGRFDYWGQGTLVTVSS

SEQ ID NO: 272 - protein, 116 aa, Homo sapiens
EVQLLESGGGLVQPGGSLRLSCAASGFTFRNYGMAWVRQAPGKGLEWVSWIDASGTETYYADSVKGRFTISRDNSKNTLYLQMNSLRAEDTAVYYCAKELGRFDYWGQGTLVTVSS

SEQ ID NO: 273 - protein, 116 aa, Homo sapiens
EVQLLESGGGLVQPGGSLRLSCAASGFTFRNYGMAWVRQAPGKGLEWVSWIDASGTETYYADSVKGRFTISRDNSKNTLYLQMNSLRAEDTAVYYCAKPLGRFDYWGQGTLVTVSS

SEQ ID NO: 274 - protein, 116 aa, Homo sapiens
EVQLLESGGGLVQPGGSLRLSCAASGFTFRNYGMAWVRQAPGKGLEWVSWIDASGTETYYADSVKGRFTISRDNSKNTLYLQMNSLRAEDTAVITVRNGWGVLTTGVREPWSPSRA

SEQ ID NO: 275 - protein, 116 aa, Homo sapiens
EVQLLESGGGLVQPGGSLRLSCAASGFTFRNYGMAWVRQAPGKGLEWVSWIDASGTETYYADSVKGRFTISRDNSKNTLYLQMNSLRAEDTAVYYCAKTLGRFDYWGQGTLVTVSS

SEQ ID NO: 276 - protein, 116 aa, Homo sapiens
EVQLLESGGGLVQPGGSLRLSCAASGFTFRNYGMAWVRQAPGKGLEWVSWIDASGTETYYADSVKGRFTISRDNSKNTLYLQMNSLRAEDTAVYYCAKGLGRFDYWGQGTLVTVSS

SEQ ID NO: 277 - protein, 116 aa, Homo sapiens
EVQLLESGGGLVQPGGSLRLSCAASGFTFRNYGMAWVRQAPGKGLEWVSWIDASGTETYYADSVKGRFTISRDNSKNTLYLQMNSLRAEDTAVYYCAKSEGRFDYWGQGTLVTVSS

SEQ ID NO: 278 - protein, 116 aa, Homo sapiens
EVQLLESGGGLVQPGGSLRLSCAASGFTFRNYGMAWVRQAPGKGLEWVSWIDASGTETYYADSVKGRFTISRDNSKNTLYLQMNSLRAEDTAVYYCAKSHGRFDYWGQGTLVTVSS

SEQ ID NO: 279 - protein, 116 aa, Homo sapiens
EVQLLESGGGLVQPGGSLRLSCAASGFTFRNYGMAWVRQAPGKGLEWVSWIDASGTETYYADSVKGRFTISRDNSKNTLYLQMNSLRAEDTAVYYCAKSSGRFDYWGQGTLVTVSS

SEQ ID NO: 280 - protein, 116 aa, Homo sapiens
EVQLLESGGGLVQPGGSLRLSCAASGFTFRNYGMAWVRQAPGKGLEWVSWIDASGTETYYADSVKGRFTISRDNSKNTLYLQMNSLRAEDTAVYYCAKSAGRFDYWGQGTLVTVSS

SEQ ID NO: 281 - protein, 116 aa, Homo sapiens
EVQLLESGGGLVQPGGSLRLSCAASGFTFRNYGMAWVRQAPGKGLEWVSWIDASGTETYYADSVKGRFTISRDNSKNTLYLQMNSLRAEDTAVYYCAKSNGRFDYWGQGTLVTVSS

SEQ ID NO: 282 - protein, 116 aa, Homo sapiens
EVQLLESGGGLVQPGGSLRLSCAASGFTFRNYGMAWVRQAPGKGLEWVSWIDASGTETYYADSVKGRFTISRDNSKNTLYLQMNSLRAEDTAVYYCAKSLPRFDYWGQGTLVTVSS

SEQ ID NO: 283 - protein, 116 aa, Homo sapiens
EVQLLESGGGLVQPGGSLRLSCAASGFTFRNYGMAWVRQAPGKGLEWVSWIDASGTETYYADSVKGRFTISRDNSKNTLYLQMNSLRAEDTAVYYCAKSLGRWDYWGQGTLVTVSS

SEQ ID NO: 284 - protein, 116 aa, Homo sapiens
EVQLLESGGGLVQPGGSLRLSCAASGFTFRNYGMAWVRQAPGKGLEWVSWIDASGTETYYADSVKGRFTISRDNSKNTLYLQMNSLRAEDTAVYYCAKSLGRLDYWGQGTLVTVSS

SEQ ID NO: 285 - protein, 116 aa, Homo sapiens
EVQLLESGGGLVQPGGSLRLSCAASGFTFRNYGMAWVRQAPGKGLEWVSWIDASGTETYYADSVKGRFTISRDNSKNTLYLQMNSLRAEDTAVYYCAKSLGRFPYWGQGTLVTVSS

SEQ ID NO: 286 - protein, 116 aa, Homo sapiens
EVQLLESGGGLVQPGGSLRLSCAASGFTFRNYGMAWVRQAPGKGLEWVSWIDASGTETYYADSVKGRFTISRDNSKNTLYLQMNSLRAEDTAVYYCAKSLGRFDVWGQGTLVTVSS

SEQ ID NO: 287 - protein, 116 aa, Homo sapiens
EVQLLESGGGLVQPGGSLRLSCAASGFTFRNYGMAWVRQAPGKGLEWVSWIDASGTETYYADSVKGRFTISRDNSKNTLYLQMNSLRAEDTAVYYCAKSLGGFDYWGQGTLVTVSS

SEQ ID NO: 288 - protein, 116 aa, Homo sapiens; identical to SEQ ID NO: 214

SEQ ID NO: 289 - protein, 116 aa, Homo sapiens
EVQLLESGGGLVQPGGSLRLSCAASGFTFRNYGMAWVRQAPGKGLEWVSWIDASGTETYYADPVKGRFTISRDNSKNTLYLQMNSLRAEDTAVYYCAKSLGRFDYWGQGTLVTVSS

SEQ ID NO: 290 - protein, 116 aa, Homo sapiens
EVQLLESGGGLVQPGGSLRLSCAASGFTFRNYGMAWVRQAPGKGLEWVSWIDASGTETYYADPVKGRFTLSRDNSKNTLYLQMNSLRAEDTAVYYCAKSLGRFDYWGQGTLVTVSS

SEQ ID NO: 291 - protein, 116 aa, Homo sapiens
EVQLLDSGGGLVQPGGSLRLSCAASGFTFRNYGMAWVRQAPGKGLEWVSWIDASGTETYYADPVKGRFTLSRDNSKNTLYLQMNSLRAEDTAVYYCAKSLGRFDYWGQGTLVTVSS

SEQ ID NO: 292 - protein, 116 aa, Homo sapiens
EVQLLDSGGGLVQPGGSLRLSCAASGFTFRNYGMAWVRQAPGKGLEWVSWIDASGTETYYADPVKGRFTISRDNSKNTLYLQMNSLRAEDTAVYYCAKSLGRFDYWGQGTLVTVSS

SEQ ID NO: 293 - protein, 116 aa, Homo sapiens
EVQLLESGGGLVQPGGSLRLSCAASGFTFLHHGMAWVRQAPGKGLEWVSWIDASGTETYYADSVRGRFTISRDNSKNTLYLQMNSLRAEDTAVYYCAKSLGRFDYWGQGTLVTVSS

SEQ ID NO: 294 - protein, 116 aa, Homo sapiens
EVQLLESGGGLVQPGGSLRLSCAASGFTFRNHGMGWVRQAPGKGLEWVSWIDASGTETYYADSVKGRFTISRDNSKNTLYLQMNSLRAEDAAVYYCAKSLGRFDYWGQGTLVTVSS

SEQ ID NO: 295 - protein, 116 aa, Homo sapiens
EVQLLESGGGLVQPGGSLRLSCAASGFTFRNFGMGWVRQAPGKGLEWVSWIDASGTETYYADSVKGRLTISRDNSKNTLYLQMNSLRAEDTAVYYCAKSLGRFDYWGQGTLVTVSS

SEQ ID NO: 296 - protein, 116 aa, Homo sapiens
EVQLLESGGGLVQPGGSLRLSCAASGFTFRNYGMAWVRQAPGKGLEWVSWILGSGTETYYADSVKGRFTISRDNSRNTLYLQMNSLRAEDTAVYYCAKSLGRFDYWGQGTLVTVSS

SEQ ID NO: 297 - protein, 116 aa, Homo sapiens
EVQLLESGGGLVQPGGSLRLSCAASGFTFRNYGMAWVRQAPGKGLEWVSWIISSGTETYYADSVKGRFTISRDNSKNTLYLQMNSLRAEDTAVYYCAKSLGRFDYWGQGTLVTVSS

SEQ ID NO: 298 - protein, 116 aa, Homo sapiens
EVQLLESGGGLVQPGGSLRLSCAASGFTFRNYGMAWVRQAPGKGLEWVSWILSSGTETYYADSVKGRFTISRDNSKNTLYLQMNSLRAEDTAVYYCAKSLGRFDYWGQGTLVTVSS

SEQ ID NO: 299 - protein, 116 aa, Homo sapiens
EVQLLESGGGLVQPGGSLRLSCAASGFTFRNYGMAWVRQAPGKGLEWVSFILPSGTETYYADSVKGRFTISRDNSKNTLYLQMNSLRAEDTAVYYCAKSLGRFDYWGQGTLVTVSS

SEQ ID NO: 300 - protein, 116 aa, Homo sapiens
EVQLLESGGGLVQPGGSLRLSCAASGFTFRNYGMAWVRQAPGKGLEWVSWIRGSGTETYYADSVKGRFTISRDNSRNTLYLQMNSLRAEDTAVYYCAKSLGRFDYWGQGTLVTVSS

SEQ ID NO: 301 - protein, 116 aa, Homo sapiens
EVQLLESGGGLVQPGGSLRLSCAASGFTFRNYGMAWVRQAPGKGLEWVSWIRGSGTETYYADSVKGRFTISRDNSKNTLYLQMNSLRAEDTAVYYCAKSLGRFDYWGQGTLVTVSS

SEQ ID NO: 302 - protein, 116 aa, Homo sapiens
EVQLLESGGGLVQPGGSLRLSCAASGFTFRNYGMAWVRQAPGKGLEWVSWIDAKGKETYYADSVKGRFTISRDNSKNTLYLQMNSLRAEDTAVYYCAKSLGRFDYWGQGTLVTVSS

SEQ ID NO: 303 - protein, 116 aa, Homo sapiens
EVQLLESGGGLVQPGGSLRLSCAASGFTFRNYGMAWVRQAPGKGLEWVSWIDAKGRETYYADSVKGRFTISRDNSKNTLYLQMNSLRAEDTAVYYCAKSLGRFDYWGQGTLVTVSS

SEQ ID NO: 304 - protein, 116 aa, Homo sapiens
EVQLLESGGGLVQPGGSLRLSCAASGFTFRNYGMAWVRQAPGKGLEWVSWIVGGGTETYYADSVKGRFTISRDNSKNTLYLQMNSLRAEDTAVYYCAKSLGRFDYWGQGTLVTVSS

SEQ ID NO: 305 - protein, 116 aa, Homo sapiens
EVQLLESGGGLVQPGGSLRLSCAASGFTFRNYGMAWVRQAPGKGLEWVSWIEGGGTETYYADSVKGRFTISRDNSKNTLYLQMNSLRAEDTAVYYCAKSLGRFDYWGQGTLVTVSS

SEQ ID NO: 306 - protein, 116 aa, Homo sapiens
EVQLLESGGGLVQPGGSLRLSCAASGFTFRNYGMAWVRQAPGKGLEWVSWIVGQGTETYYADSVKGRFTISRDNSKNTLYLQMNSLRAEDTAVYYCAKSLGRFDYWGQGTLVTVSS

SEQ ID NO: 307 - protein, 116 aa, Homo sapiens
EVQLLESGGGLVQPGGSLRLSCAASGFTFRNYGMAWVRQAPGKGLEWVSWIVGSGTETYYADSVKGRFTISRDNSKNTLYLQMNSLRAEDTAVYYCAKSLGRFDYWGQGTLVTVSS

SEQ ID NO: 308 - protein, 116 aa, Homo sapiens
EVQLLESGGGLVQPGGSLRLSCAASGFTFRNYGMAWVRQAPGKGLEWVSWIHNTGTETYYADSVKGRFTISRDNSKNTLYLQMNSLRAEDTAVYYCAKSLGRFDYWGQGTLVTVSS

SEQ ID NO: 309 - protein, 116 aa, Homo sapiens
EVQLLESGGGLVQPGGSLRLSCAASGFTFHPHGMAWVRQAPGKGLEWVSWIDASGTETYYADSVKGRFTISRDNSKNTLYLQMNSLRAEDTAVYYCAKSLGRFDYWGQGTLATVSS

SEQ ID NO: 310 - protein, 116 aa, Homo sapiens
EVQLLESGGGLVQPGGSLRLPCAASGFTFRNFGMGWVRQAPGKGLEWVSWIDASGTETYYADSVKGRFTISRDNSKNTLYLQMNSLRAEDTAVYYCAKSLGRFDYWGQGTLVTVSS

SEQ ID NO: 311 - protein, 116 aa, Homo sapiens
EVQLLESGGGLVQPGGSLRLSCAASGFTFRNFGMGWVRQAPGKGLEWVSWIDASGTETYYADSVKGRFTISRDNSKNTLYLQMNSLRAEDTAVYYCAKSLGRFDYWGQGTLVTVSS

SEQ ID NO: 312 - protein, 116 aa, Homo sapiens
EVQLLESGGGLVQPGGSLRLSCAASGFTFRNYGMAWVRQAPGKGLEWVSFIHSSGTETYYADSVKGRFTISRDNSKNTLYLQMNSLRAEDTAVYYCAKSLGRFDYWGQGTLVTVSS

SEQ ID NO: 313 - protein, 116 aa, Homo sapiens
EVQLLESGGGLVQPGGSLRLSCAASGFTFRNYGMAWVRQAPGKGLEWVSWIESSGTETYYADSVKGRFTISRDNSKNTLYLQMNSLRAEDTAVYYCAKSLGRFDYWGQGTLVTVSS

SEQ ID NO: 314 - protein, 116 aa, Homo sapiens
EVQLLESGGGLVQPGGSLRLSCAASGFTFRNYGMAWVRQAPGKGLEWVSWILNSGTETYYADSVKGRFTISRDNSKNTLYLQMNSLRAEDTAVYYCAKSLGRFDYWGQGTLVTVSS

SEQ ID NO: 315 - protein, 116 aa, Homo sapiens
EVQLLESGGGLVQPGGSLRLSCAASGFTFRNYGMAWVRQAPGKGLEWVSWIQNSGTETYYADSVKGRFTISRDNSKNTLYLQMNSLRAEDTAVYYCAKSLGRFDYWGQGTLVTVSS

SEQ ID NO: 316 - protein, 116 aa, Homo sapiens
EVQLLESGGGLVQPGGSLRLSCAATGFTFRNYGMAWVRQAPGKGLEWVSWIVGSGTETYYADSVKGRFTISRDNSKNTLYLQMNSLRAEDTAVYYCAKSLGRFDYWGQGTLVTVSS

SEQ ID NO: 317 - protein, 116 aa, Homo sapiens
EVQLLESGGGLVQPGGSLRLSCAASGFTFRNYGMAWVRQAPGKGLEWVSFILSSGTETYYADSVKGRFTISRDNSKNTLYLQMNSLRAEDTAVYYCAKSLGRFDYWGQGTLVTVSS

SEQ ID NO: 318 - protein, 116 aa, Homo sapiens
EVQLLESGGGLVQPGGSLRLFCAASGFTFRNYGMAWVRQAPGKGLEWVSWIDAKGRETYYADSVKGRFTISRDNSKNTLYLQMNSLRAEDTAVYYCAKSLGRFDYWGQGTLVTVSS

SEQ ID NO: 319 - protein, 116 aa, Homo sapiens
EVQLLESGGGLVQPGGSLRLSCAASGFTFRNYGMAWVRQAPGKGLEWVSWIDAKGKETYYADSVKGRFTISRDNSKNTLYLQMNSLRAEDTAVYYCAKSLGRFDYWGQGTLVTASS

SEQ ID NO: 320 - protein, 116 aa, Homo sapiens
EVQLLESGGGLVQPGGSLRLSCAASGFTFRNYGMAWVRQAPGKGLEWVSWIEGRGTETYYADSVKGRFTISRDNSKNTLYLQMNSLRAEDTAVYYCAKSLGRFDYWGQGTLVTVSS

SEQ ID NO: 321 - protein, 116 aa, Homo sapiens
EVQLLESGGGLVQPGGSLRLSCAASGFTFRNYGMAWVRQAPGKGLEWVSWIDASGTETYYADSVKGRFTISRGNSKNTLYLQMNSLRAEDTAVYYCAKSLGRFDYWGQGTLVTVSS

SEQ ID NO: 322 - protein, 116 aa, Homo sapiens
EVQLLESGGGLVQPGGSLRLSCAASGFTFRNYGMAWVRQAPGKGLEWVSWIVGGGTETYYADSVKGRFAISRDNSKNTLYLQMNSLRAEDTAVYYCAKSLGRFDYWGQGTLVTVSS

SEQ ID NO: 323 - protein, 116 aa, Homo sapiens
EVQLLESGGGLVQPGGSPRLSCAASGFTFKENGMAWVRQASGKGLEWVSWIDASGTETYYADSVKGRFTISRDNSKNTLYLQMNSLRAEDTAVYYCAKSLGRFDYWGQGTLVTVSS

SEQ ID NO: 324 - protein, 116 aa, Homo sapiens
EVQLLESGGGLVQPGGSLRLSCAASGFTFRNYGMGWVRQAPGKGLEWVSWIDASGTETYYADSVKGRFTISRDNSKNTLYLQMNSLRAEDAAVYYCAKSLGRFDYWGQGTLVTVSS

SEQ ID NO: 325 - protein, 116 aa, Homo sapiens
EVQLLESGGGLVQPGGSLRLSCAASGFTFRNFGMGWVRQAPGKGLEWVSWIDASGTETYYADSVKGRFTISRDNSKNTLYLQMNSLRAEDAAVYYCAKSLGRFDYWGQGTLVTVSS

SEQ ID NO: 326 - protein, 116 aa, Homo sapiens
EVQLLESGGGLVQPGGSLRLSCAASGFTFRNYGMAWVRQAPGKGLEWVSFILPSGTETYYADSVKGRFTISRDNSKNTLYLQMNSLRAEDAAVYYCAKSLGRFDYWGQGTLVTVSS

SEQ ID NO: 327 - protein, 116 aa, Homo sapiens
EVQLLESGGGLVQPGGSLRLSCAASGFTFRNYGMAWVRQAPGKGLEWVSFIVGSGTETYYADSVKGRFTISRDNSKNTLYLQMNSLRAEDTAVYYCAKSLGRFDYWGQGTLVTVSS

SEQ ID NO: 328 - protein, 116 aa, Homo sapiens
EVQLLESGGGLVQPGGSLRLSCAASGFTFRNYGMAWVRQAPGKGLEWVSWITWSGTETYYADSVKGRFTISRDNSKNTLYLQMNSLRAEDTAVYYCAKSLGRFDYWGQGTLVTVSS

SEQ ID NO: 329 - protein, 116 aa, Homo sapiens
EVQLLESGGGLVQPGGSLRLSCAASGFTFRNYGMAWVRQAPGKGLEWVSFIVSSGTETYYADSVKGRFTISRDNSKNTLYLQMNSLRAEDTAVYYCAKSLGRFDYWGQGTLVTVSS

SEQ ID NO: 330 - protein, 116 aa, Homo sapiens
EVQLLESGGGLVQPGGSLRLSCAASGFTFRNYGMAWVRQAPGKGLEWVSWITNSGTETYYADSVKGRFTISRDNSKNTLYLQMNSLRAEDTAVYYCAKSLGRFDYWGQGTLVAVSS

SEQ ID NO: 331 - protein, 116 aa, Homo sapiens
EVQLLESGGGLVQPGGSLRLSCAASGFTFRNYGMAWVRQAPGKGLEWVSWILASGTETYYADSVKGRFTISRDNSKNTLYLQMNSLRAEDTAVYYCAKSLGRFDYWGQGTLVTVSS

SEQ ID NO: 332 - protein, 116 aa, Homo sapiens
EVQLLESGGGLVQPGGSLRLFCAASGFTFRNYGMAWVRQAPGKGLEWVSWIDAKGNETYYADSVKGRFTISRDNSKNTLYLQMNSLRAEDTAVYYCAKSLGRFDYWGQGTLVTVSS

SEQ ID NO: 333 - protein, 116 aa, Homo sapiens
EVQLLESGGGLVQPGGSLRLSCAASGFTFRNYGMAWVRQAPGKGLEWVSWIDAKGKETYYADSVKGRFTISRDNSKNTLYLQMNSLRAEDTAVYYCAKSLGRFDYWGQGALVTVSS

SEQ ID NO: 334 - protein, 116 aa, Homo sapiens
EVQLLESGGGLVQPGGSLRLSCAASGFTFRNYGMAWVRQAPGKGLEWVSWIDAMGKETYYADSVKGRFTISRDNSKNTLYLQMNSLRAEDTAVYYCAKSLGRFDYWGQGTLVTVSS

SEQ ID NO: 335 - protein, 116 aa, Homo sapiens
EVQLLESGGGLVQPGGSLRLSCAASGFTFRNYGMAWVRQAPGKGLEWVSWIDASSTETYYADSVKGRFTISRDNSKNTLYLQMNSLRAEDTAVYYCAKSLGRFDYWGQGTLVTVSS

SEQ ID NO: 336 - protein, 116 aa, Homo sapiens
EVQLLESGGGLVQPGGSLRLSCAASGFTFRNFGMGWVRQAPGKGLEWVSWILGSGTETYYADSVKGRFTISRDNSRNTLYLQMNSLRAEDTAVYYCAKSLGRFDYWGQGTLVTVSS

SEQ ID NO: 337 - protein, 116 aa, Homo sapiens
EVQLLESGGGLVQPGGSLRLSCAASGFTFRNFGMGWVRQAPGKGLEWVSWIVGSGTETYYADSVKGRFTISRDNSKNTLYLQMNSLRAEDTAVYYCAKSLGRFDYWGQGTLVTVSS

SEQ ID NO: 338 - protein, 116 aa, Homo sapiens
EVQLLESGGGLVQPGGSLRLSCAASGFTFRNFGMGWVRQAPGKGLEWVSWIEGGGTETYYADSVKGRFTISRDNSKNTLYLQMNSLRAEDTAVYYCAKSLGRFDYWGQGTLVTVSS

SEQ ID NO: 339 - protein, 116 aa, Homo sapiens
EVQLLESGGGLVQPGGSLRLSCAASGFTFRNFGMGWVRQAPGKGLEWVSWIISSGTETYYADSVKGRFTISRDNSKNTLYLQMNSLRAEDTAVYYCAKSLGRFDYWGQGTLVTVSG

SEQ ID NO: 340 - protein, 116 aa, Homo sapiens
EVQLLESGGGLVQPGGSLRLSCAASGFTFGDTMMGWVRQAPGKGLEWVSAIMHDGVHTYYADSVKGRFTISRDNSKNTLYLQMNSLRAEDTAVYYCAKSLGRFDYWGQGTLVTVSS

SEQ ID NO: 341 - protein, 116 aa, Homo sapiens
EVQLLESGGGLVQPGGSLRLSCAASGFTFGENGMGWVRQAPGKGLEWVSYIEDDGTHTYYADSVKGRFTISRDNSKNTLYLQMNSLRAEDTAVYYCAKSYGAFDYWGQGTLVTVSS

SEQ ID NO: 342 - protein, 116 aa, Homo sapiens
EVQLLESGGGLVQPGGSLRLSCAASGFTFEFAGMAWVRQAPGKGLEWVSSIDWDGGMTYYADSVKGRFTISRDNSKNTLYLQMNSLRAEDTAVYYCAKHEMDFDYWGQGTLVTVSS

SEQ ID NO: 343 - protein, 116 aa, Homo sapiens
  VARIANT 56: Xaa = Any Amino Acid
EVQLLESGGGLVQPGGSLRLSCAASGFTFPANGMGWVRQAPGKGLEWVSYIDSNGXLTYYADSVKGRFTISRDNSKNTLYLQMNSLRAEDTAVYYCAKSYGAFDYWGQGTLVTVSS

SEQ ID NO: 344 - protein, 116 aa, Homo sapiens
EVQLLESGGGLVQPGGSLRLSCAASGFTFDETGMGWVRQAPGKGLEWVSYIESHGMGTYYADSVKGRFTISRDNSKNTLYLQMNSLRAEDTAVYYCAKSYGAFDYWGQGTLVTVSS

SEQ ID NO: 345 - protein, 116 aa, Homo sapiens
  VARIANT 52: Xaa = Any Amino Acid
EVQLLESGGGLVQPGGSLRLSCAASGFTFFDHGMGWVRQAPGKGLEWVSYIXTPGGETYYADSVKGRFTISRDNSKNTLYLQMNSLRAEDTAVYYCAKSYGAFDYWGQGTLVTVSS

SEQ ID NO: 346 - protein, 116 aa, Homo sapiens
  VARIANT 98: Xaa = Any Amino Acid
EVQLLESGGGLVQPGGSLRLSCAASGFTFRDEPMAWVRQAPGKGLEWVSDISAEGETTYYADSVKGRFTISRDNSKNTLYLQMNSLRAEDTAVYYCAXTLGTFDYWGQGTLVTVSS

SEQ ID NO: 347 - protein, 116 aa, Homo sapiens
EVQLLESGGGLVQPGGSLRLSCAASGFTFGDHGMGWVRQAPGKGLEWVSYIGSTGGRTYYADSVKGRFTISRDNSKNTLYLQMNSLRAEDTAVYYCAKSYGAFDYWGQGTLVTVSS

SEQ ID NO: 348 - protein, 116 aa, Homo sapiens
EVQLLESGGGLVQPGGSLRLSCAASGFTFDDEMMSWVRQAPGKGLEWVSEITAGGVITYYADSVKGRFTISRDNSKNTLYLQMNSLRAEDTAVYYCATTGSDFDYWGQGTLVTVSS

SEQ ID NO: 349 - DNA, 324 bp, Homo sapiens
gacatccagatgacccagtctccatcctccctgtctgcatccgtaggagaccgtgtcaccatcacttgccgggcaagtcagccgattgggatttggttaaattggtaccagcagaaaccagggaaagcccctaagctcctgatctatgagatttccattttgcaaagtggggtcccatcacgtttcagtggcagtggatctgggacagatttcactctcaccatcagcagtctgcaacctgaagattttgctacgtactactgtcaacaggatctgactaatcctcgtacgttcggccaagggaccaaggtggaaatcaaacgg

SEQ ID NO: 350 - DNA, 324 bp, Homo sapiens
gacatccagatgacccagtctccatcctccctgtctgcatctgtaggagaccgtgtcaccatcacttgccgggcaagtcagtcgattgatctgtggttagcctggtatcagcagaaaccagggaaagcccctaggctcctgatctattattcttcccagttgcaaagtggggtcccatcacgtttcagtggcagtggatctgggacagatttcactctcaccatcagcagtctgcaacctgaagattttgctacgtactactgtcaacagctgtttattactcctttgacgttcggccaagggaccaaggtggaaatcaaacgg

SEQ ID NO: 351 - DNA, 324 bp, Homo sapiens
gacatccagatgacccagtctccatcctccctgtctgcatctgtaggagaccgtgtcaccatcacttgccgggcaagtcaggatatttgggagtatttagcgtggtaccagcagaaaccagggaaagcccctaagctcctgatctatgggagttccaggttgcaaagtggggtcccatcacgtttcagtggcagtggatctgggacagatttcactctcaccatcagcagtctgcaacctgaagattttgctacgtactactgtcagcaagattatgtttatcctcctacgttcggccaagggaccaaggtggaaatcaaacgg

SEQ ID NO: 352 - DNA, 324 bp, Homo sapiens
gacatccagatgacccagtctccatcctccctgtctgcatctgtaggagaccgtgtcaccatcacttgccgggcaagtcaggagattcatgagtttttaaattggtaccagcagaaaccagggaaagcccctaagctcctgatctatgaggtgtcccatttgcaaagtggggtcccatcacgtttcagtggcagtggatctgggacagatttcactctcaccatcagcagtctgcaacctgaagattttgctacgtactactgtcaacaggattttacggatccttttacgttcggccaagggaccaaggtggaaatcaaacgg

SEQ ID NO: 353 - DNA, 324 bp, Homo sapiens
gacatccagatgacccagtctccatcctccctgtctgcatctgtaggagaccgtgtcaccatcacttgccgggcaagtcaggggattactgattggttagcttggtatcagcagaaaccagggaaagccccgaagctcctgatctatggtagttcctggttgcaaagtggggtcccatcacgtttcagtggcagtggatctgggacagatttcactctcaccatcagcagtctgcaacctgaagattttgctacgtactactgtcaacagcttatgtctcctcctcttacgttcggccaagggaccaaggtggagatcaaacgg

SEQ ID NO: 354 - DNA, 324 bp, Homo sapiens
gacatccagatggcccagtctccatcctccctgtctgcatctgtaggagaccgtgtcaccatcacttgccgggcaagtcagcctatttatgattggttagcttggtaccagcagaaaccagggaaagcccctaagctcctgatctattcggcttccgagttgcaaagtggggtcccatcacgtttcagtggcagtggatctgggacagatttcactctcaccatcagcagtctgcaacctgaagattttgctacgtactactgtcaacagcttcagactaagcctctgacgttcggccaagggaccaaggtggaaatcaaacgg

SEQ ID NO: 355 - DNA, 324 bp, Homo sapiens
gacatccagatgacccagtctccatcctccctgtctacatctgtaggagaccgtgtcaccatcacttgccgggcaagtcaggatattggggattggttagcttggtaccagcagaaaccagggaaagcccctaagctcctgatctattataattcccatttgcaaagtggggtcccatcacgtttcagtggcagtggatctgggacagatttcactctcaccatcagcagtctgcaacctgaagattctgctacgtactactgtcaacagtatgctgatattcctatgacgttcggccaagggaccaaggtggagatcaaacgg

SEQ ID NO: 356 - DNA, 324 bp, Homo sapiens
gacatccagatgacccagtctccatcctccctgtctgcatctgtaggagaccgtgtcaccatcacttgccgggcaagtcagccgattgcgtattttttatcgtggtatcagcagaaaccagggaaagcccctaagctcctgatctataatgactccacgttgcaaagtggggtcccatcacgtttcagtggcagtggatctgggacagatttcactctcaccatcagcagtctgcaacctgaagattttgctacgtactactgtcaacaggatgcttttcatcctcctacgttcggccaagggaccaaggtggaaatcaagcgg

SEQ ID NO: 357 - DNA, 324 bp, Homo sapiens
gacatccagatgacccagtgtccatcctccctgtctgcatctgtaggagaccgtgtcaccatcacttgccgggcaagtcagccgattggggattggttaaattggtaccagcagaaaccagggaaagcccctaagctcctgatctatcatatttccaatttgcaaagtggggtcccatcacgtttcagtggcagtggatctgggacagatttcactctcaccatcagcagtctgcaacctgaagattttgctacgtactactgtcaacagctgcttcagtatcctctgacgttcggccaagggaccaaggtggaaatcaaacgg

SEQ ID NO: 358 - DNA, 324 bp, Homo sapiens
gacatccagatgacccagtctccatcctccctgtctgcatctgtaggagaccgtgtcaccatcacttgccgggcaagtcagaatattaatttttggttacggtggtaccagcagaaaccagggaaagcccctacgctcctgatctatgatgcttccgctttgcagagtggggtcccatcacgtttcagtggcagtggatctgggacagatttcactctcaccatcagcagtctgcaacctgaagattttgctacgtactactgtcaacaggattttaatcctccttatacgttcggccaagggaccaaggtggaaatcaaacgg

SEQ ID NO: 359 - DNA, 324 bp, Homo sapiens
gacatccagatgacccagtctccatcctccctgtctgcatctgtaggagaccgtgtcaccatcacttgccgggcaagtcagaatattaatttttggttacggtggtaccagcagaaaccagggaaagcccctacgctcctgatctatgatgcttcccgcagccagagtggggtcccatcacgtttcagtggcagtggatctgggacagatttcactctcaccatcagcagtctgcaacctgaagattttgctacgtactactgtcaacaggattttaatcctccttatacgttcggccaagggaccaaggtggaaatcaaacgg

SEQ ID NO: 360 - DNA, 324 bp, Homo sapiens
gacatccagatgacccagtctccatcctccctgtctgcatctgtaggagaccgtgtcaccatcacttgccgggcaagtcagaatattaatttttggttacggtggtaccagcagaaaccagggaaagcccctacgctcctgatctatgatgcttccgctttgcagagtggggtcccatcacgtttcagtggcagtggatctgggacagatttcactctcaccatcagcagtctgcaacctgaagattttgctacgtactactgtcaacaggatttaatgcctccttatacgttcggccaagggaccaaggtggaaatcaaacgg

SEQ ID NO: 361 - DNA, 324 bp, Homo sapiens
gacatccagatgacccagtctccatcctccctgtctgcatctgtaggagaccgtgtcaccatcacttgccgggcaagtcagaatattaatttttggttacggtggtaccagcagaaaccagggaaagcccctacgctcctgatctatgatgcttcccgcagccagagtggggtcccatcacgtttcagtggcagtggatctgggacagatttcactctcaccatcagcagtctgcaacctgaagattttgctacgtactactgtcaacaggatttaatgcctccttatacgttcggccaagggaccaaggtggaaatcaaacgg

SEQ ID NO: 362 - DNA, 324 bp, Homo sapiens
gacatccagatgacccagtctccatcctccctgtctgcatctgtaggagaccgtgtcaccatcacttgccacgcgagccagaatattaatttttggttacggtggtaccagcagaaaccagggaaagcccctacgctcctgatctatgatgcttccgctttgcagagtggggtcccatcacgtttcagtggcagtggatctgggacagatttcactctcaccatcagcagtctgcaacctgaagattttgctacgtactactgtcaacaggattttaatcctccttatacgttcggccaagggaccaaggtggaaatcaaacgg

SEQ ID NO: 363 - DNA, 324 bp, Homo sapiens
gacatccagatgacccagtttccatcctccctgtctgcatctgtaggagaccgtgtcaccatcacttgcaccaccgaccagaatattaatttttggttacggtggtaccagcagaaaccagggaaagcccctacgctcctgatctatgatgcttccgctttgcagagtggggtcccatcacgtttcagtggcagtggatctgggacagatttcactctcaccatcagcagtctgcaacctgaagattttgctacgtactactgtcaacaggattttaatcctccttatacgttcggccaagggaccaaggtggaaatcaaacgg

SEQ ID NO: 364 - DNA, 324 bp, Homo sapiens
gacatccagatgacccagtccccatcctccctgtctgcatctgtaggagaccgtgtcaccatcacttgcgcggccagccagaatactaatttttggttacggtggtaccagcagaaaccagggaaagcccctacgctcctgatctatgatgcttccgctttgcagagtggggtcccatcacgtttcagtggcagtggatctgggacagatttcactctcaccatcagcagtctgcaacctgaagattttgctacgtactactgtcaacaggattttaatcctccttatacgttcggccaagggaccaaggtggaaatcaaacgg

SEQ ID NO: 365 - DNA, 324 bp, Homo sapiens
gacatccagatgacccagtccccatcctccctgtctgcatctgtaggagaccgtgtcaccatcacttgcaacaccacccagaatattaatttttggttacggtggtaccagcagaaaccagggaaagcccctacgctcctgatctatgatgcttccgctttgcagagtggggtcccatcacgtttcagtggcagtggatctgggacagatttcactctcaccatcagcagtctgcaacctgaagattctgctacgtactactgtcaacaggattttaatcctccttatacgttcggccaagggaccaaggtggaaatcaaacgg

SEQ ID NO: 366 - DNA, 324 bp, Homo sapiens
gacatccagatgacccagtctccatcctccctgtctgcatctgtaggagaccgtgtcaccatcacttgccgggcaagtcagaatattaatttttggttacggtggtaccagcagaaaccagggaaagcccctacgctcctgatctatgatgcttccgctcccaacaacggggtcccatcacgtttcagtggcagtggatctgggacagatttcactctcaccatcagcagtctgcaacctgaagattttgctacgtactactgtcaacaggattttaatcctccttatacgttcggccaagggaccaaggtggaaatcaaacgg

SEQ ID NO: 367 - DNA, 324 bp, Homo sapiens
gacatccagatgacccagtccccatcctccctgtctgcatctgtaggagaccgtgtcaccatcacttgccgggcaagtcagaatattaatttttggttacggtggtaccagcagaaaccagggaaagcccctacgctcctgatctatgatgcttcccagccccagagtggggtcccatcacgtttcagtggcagtggatctgggacagatttcactctcaccatcagcagtctgcaacctgaagattttgctacgtactactgtcaacaggattttaatcctccttatacgttcggccaagggaccaaggtggaaatcaaacgg

SEQ ID NO: 368 - DNA, 324 bp, Homo sapiens
gacatccagatgacccagtctccatcctccctgtctgcatctgtaggagaccgtgtcaccatcacttgccgggcaagtcagaatattaatttttggttacggtggtaccagcagaaaccagggaaagcccctacgctcctgatctatgatgcttccgctttgcagagtggggtcccatcacgtttcagtggcagtggatctgggacagatttcactctcaccatcagcagtctgcaacctgaagattttgctacgtactactgtcaacaggattttatgaaccctttcacgttcggccaagggaccaaggtggaaataaacggg

SEQ ID NO: 369 - DNA, 324 bp, Homo sapiens
gacatccagatgacccagtctccatcctccctgtctgcatctgtaggagaccgtgtcaccatcacttgccgggcaagtcagaatattaatttttggttacggtggtaccagcagaaaccagggaaagcccctacgctcctgatctatgatgcttccgctttgcagagtggggtcccatcacgtttcagtggcagtggatctgggacagatttcactctcaccatcagcagtctgcaacctgaagattttgctacgtactactgtcaacaggattttcacttgcctttcacgttcggccaagggaccaaggtggagatcaaacgg

SEQ ID NO: 370 - DNA, 324 bp, Homo sapiens
gacatccagatgacccagtctccatcctccctgtctgcatctgtaggagaccgtgtcaccatcacttgccgggcaagtcagaatattaatttttggttacggtggtaccagcagaaaccagggaaagcccctacgctcctgatctatgatgcttccgctttgcagagtggggtcccatcacgtttcagtggcagtggatctgggacagatttcactctcaccatcagcagtctgcaacctgaagattttgctacgtactactgtcaacaggattttatgttccctctgacgttcggccaagggaccaaggtggaaatcaaacgg

SEQ ID NO: 371 - DNA, 324 bp, Homo sapiens
gacatccagatgacccagtctccatcctccctgtctgcatctgtaggagaccgtgtcaccatcacttgccgggcaagtcagaatattaatttttggttacggtggtaccagcagaaaccagggaaagcccctacgctcctgatctatgatgcttccgctttgcagagtggggtcccatcacgtttcagtggcagtggatctgggacagatttcactctcaccatcagcagtctgcaacctgaagattttgctacgtactactgtcaacaggatttttcgcagcctttcacgttcggccaagggaccaaggtggaaatcaaacgg

SEQ ID NO: 372 - DNA, 324 bp, Homo sapiens
gacatccagatgacccagtcaccatcctccctgtctgcatctgtaggagaccgtgtcaccatcacttgccgggcaagtcagagtattaatttttggttacggtggtaccagcagaaaccagggaaagcccctacgcttctgatctatgatgcttcccgcacgcagagtggggtcccatcacgtttcagtggcagtggatctgggacagatttcactctcaccattagcagtctgcaacctgaagattttgctacgtactactgtcaacaggattttaatcctccttatacgttcggccaagggaccaaggtggaaatcaaacgg

SEQ ID NO: 373 - DNA, 323 bp, Homo sapiens
gacatccagatgacccagtctccatcctccctgtctgcatctgtaggaaaccgtgtcaccatcacttgccgggcaagtcagaatattaatttttggttacggtggtaccagcagaaaccagggaaagcccctacgctcctgatctatgatgcttcccgcagccagagtggggtcccatcaaggttcagtggcagtggatctgggacagatttcactctcaccatcagcagtctgcaacctgaagattttgctacgtactactgtcaacaggattttatgaaccctttcacgttcggccaagggaccaaggtggaaataaacgg

SEQ ID NO: 374 - DNA, 324 bp, Homo sapiens
gacatccagatgacccagtctccatcctccctgtctgcatctgtaggagaccgtgtcaccatcacttgccgggcaagtcagaatattaatttttggttacggtggtaccagcagaaaccagggaaagcccctacgctcctgatctatgatgcttcccgcagccagagtggggtcccatcaaggttcagtggcagtggatctgggacagatttcactctcaccatcagcagtctgcaacctgaagattttgctacgtactactgtcaacaggattttcacttgcctttcacgttcggccaagggaccaaggtggagatcaaacgg

SEQ ID NO: 375 - DNA, 324 bp, Homo sapiens
gacatccagatgacccagtctccatcctccctgtctgcatctgtaggagaccgtgtcaccatcacttgccgggcaagtcagaatattaatttttggttacggtggtaccagcagaaaccagggaaagcccctacgctcctgatctatgatgcttcccgcagccagagtggggtcccatcaaggttcagtggcagtggatctgggacagatttcactctcaccatcagcagtctgcaacctgaagattttgctacgtactactgtcaacaggattttatgttccctctgacgttcggccaagggaccaaggtggaaatcaaacgg

SEQ ID NO: 376 - DNA, 324 bp, Homo sapiens
gacatccagatgacccagtctccatcctccctgtctgcatctgtaggagaccgtgtcaccatcacttgccgggcaagtcagaatattaatttttggttacggtggtaccagcagaaaccagggaaagcccctacgctcctgatctatgatgcttcccgcagccagagtggggtcccatcaaggttcagtggcagtggatctgggacagatttcactctcaccatcagcagtctgcaacctgaagattttgctacgtactactgtcaacaggatttttcgcagcctttcacgttcggccaagggaccaaggtggaaatcaaacgg

SEQ ID NO: 377 - DNA, 324 bp, Homo sapiens
gacatccagatgacccagtctccatcctccctgtctgcatctgtaggagaccgtgtcaccatcacttgccgggcaagtcagaatattaatttttggttacggtggtaccagcagaaaccagggaaagcccctacgctcctgatctatgatgcttcccgcagccagagtggggtcccatcaaggttcagtggcagtggatctgggacagatttcactctcaccatcagcagtctgcaacctgaagattttgctacgtactactgtcaacaggatttaatgcctccttatacgttcggccaagggaccaaggtggaaatcaaacgg

SEQ ID NO: 378 - DNA, 324 bp, Homo sapiens
gacatccagatgacccagtccccatcctccctgtctgcatctgtaggagaccgtgtcaccatcacttgccgggcaagtcagaatattaatttttggttacggtggtaccagcagaaaccagggaaagcccctacgcttctgatctatgatgcttccaggacccagagtggggtcccatcaaggttcagtggcagtggatctgggacagatttcactctcaccatcagcagtctgcaacctgaagattttgctacgtactactgtcaacaggatttaatgcctccttatacgttcggccaagggaccaaggtggaaatcaaacgg

SEQ ID NO: 379 - DNA, 324 bp, Homo sapiens
gacatccagatgacccagtctccatcctccctgtctgcatctgtaggagaccgtgtcaccatcacttgccgggcaagtcagaatattaatttttggttacggtggtaccagcagaaaccagggaaagcccctacgctcctgatctatgatgcttccgctcccaacaacggggccccatcaaggttcagtggcagtggatctgggacagatttcactctcaccatcagcagtctgcaacctgaagattttgctacgtactactgtcaacaggattttcacttgcctttcacgttcggccaagggaccaaggtggagatcaaacgg

SEQ ID NO: 380 - DNA, 324 bp, Homo sapiens
gacatccagatgacccagtctccatcctccctgtctgcatctgtaggagaccgtgtcaccatcacttgccgggcaagtcagaatattaatttttggttacggtggtaccagcagaaaccagggaaagcccctacgctcctgatctatgatgcttccgctcccaacaacggggtcccatcaaggttcagtggcagtggatctgggacagatttcactctcaccatcagcagtctgcaacctgaagattttgctacgtactactgtcaacaggattttatgttccctctgacgttcggccaagggaccaaggtggaaatcaaacgg

SEQ ID NO: 381 - DNA, 324 bp, Homo sapiens
gacatccagatgacccagtctccatcctccctgtctgcatctgtaggagaccgtgtcaccatcacttgccgggcaagtcagaatattaatttttggttacggtggtaccagcagaaaccagggaaagcccctacgctcctgatctatgatgcttccgctcccaacaacggggtcccatcaaggttcagtggcagtggatctgggacagatttcactctcaccatcagcagtctgcaacctgaagattttgctacgtactactgtcaacaggatttttcgcagcctttcacgttcggccaagggaccaaggtggaaatcaaacgg

SEQ ID NO: 382 - DNA, 324 bp, Homo sapiens
gacatccagatgacccagtctccatcctccctgtctgcatctgtaggagaccgtgtcaccatcacttgccgggcaagtcagaatattaatttttggttacggtggtaccagcagaaaccagggaaagcccctacgctcctgatctatgatgcttccgctcccaacaacggggtcccatcaaggttcagtggcagtggatctgggacagatttcactctcaccatcagcagtctgcaacctgaagattttgctacgtactactgtcaacaggatttaatgcctccttatacgttcggccaagggaccaaggtggaaatcaaacgg

SEQ ID NO: 383 - DNA, 323 bp, Homo sapiens
gacatccagatgacccagtccccatcctccctgtctgcatctgtaggagaccgtgtcaccatcacttgccgggcaagtcagaatattaatttttggttacggtggtaccagcagaaaccagggaaagcccctacgcttctgatctatgatgcttccaggacccagagtggggtcccatcaaggttcagtggcagtggatctgggacagatttcactctcaccatcagcagtctgcaacctgaagattttgctacgtactactgtcaacaggattttatgaaccctttcacgttcggccaagggaccaaggtggaaataaacgg

SEQ ID NO: 384 - DNA, 324 bp, Homo sapiens
gacatccagatgacccagtccccatcctccctgtctgcatctgtaggagaccgtgtcaccatcacttgccgggcaagtcagaatattaatttttggttacggtggtaccagcagaaaccagggaaagcccctacgcttctgatctatgatgcttccaggacccagagtggggtcccatcaaggttcagtggcagtgggtctgggacagatttcactctcaccatcagcagtctgcaacctgaagattttgctacgtactactgtcaacaggattttcacttgcctttcacgttcggccaagggaccaaggtggagatcaaacgg

SEQ ID NO: 385 - DNA, 324 bp, Homo sapiens
gacatccagatgacccagtccccatcctccctgtctgcatctgtaggagaccgtgtcaccatcacttgccgggcaagtcagaatattaatttttggttacggtggtaccagcagaaaccagggaaagcccctacgcttctgatctatgatgcttccaggacccagagtggggtcccatcaaggttcagtggcagtggatctgggacagatttcactctcaccatcagcagtctgcaacctgaagattttgctacgtactactgtcaacaggattttatgttccctctgacgttcggccaagggaccaaggtggaaatcaaacgg

SEQ ID NO: 386 - DNA, 324 bp, Homo sapiens
gacatccagatgacccagtccccatcctccctgtctgcatctgtaggagaccgtgtcaccatcacttgccgggcaagtcagaatattaatttttggttacggtggtaccagcagaaaccagggaaagcccctacgcttctgatctatgatgcttccaggacccagagtggggtcccatcaaggttcagtggcagtggatctgggacagatttcactctcaccatcagcagtctgcaacctgaagattttgctacgtactactgtcaacaggatttttcgcagcctttcacgttcggccaaggggccaaggtggaaatcaaacgg

SEQ ID NO: 387 - DNA, 323 bp, Homo sapiens
gacatccagatgacccagtctccatcctccctgtctgcatctgtaggagaccgtgtcaccatcacttgccgggcaagtcagaatattaatttttggttacggtggtaccagcagaaaccagggaaagcccctacgctcctgatctatgatgcttccgctcccaacaacggggtcccatcaaggttcagtggcagtggatctgggacagatttcactctcaccatcagcagtctgcaacctgaagattttgctacgtactactgtcaacaggattttatgaaccctttcacgttcggccaagggaccaaggtggaaataaacgg

SEQ ID NO: 388 - DNA, 323 bp, Homo sapiens
gacatccagatgacccagtccccatcctccctgtctgcatctgtaggagaccgtgtcaccatcacttgccgggcaagtcagaatattaatttttggttacggtggtaccagcagaaaccagggaaagcccctacgctcctgatctatgatgcttcccagccccagagtggggtcccatcaaggttcagtggcagtggatctgggacagatttcactctcaccatcagcagtctgcaacctgaagattttgctacgtactactgtcaacaggattttatgaaccctttcacgttcggccaagggaccaaggtggaaataaacgg

SEQ ID NO: 389 - DNA, 324 bp, Homo sapiens
gacatccagatgacccagtccccatcctccctgtctgcatctgtaggagaccgtgtcaccatcacttgccgggcaagtcagaatattaatttttggttacggtggtaccagcagaaaccagggaaagcccctacgctcctgatctatgatgcttcccagccccagagtggggacccatcaaggttcagtggcagtggatctgggacagatttcactctcaccatcagcagtctgcaacctgaagattttgctacgtactactgtcaacaggattttcacttgcctttcacgttcggccaagggaccaaggtggagatcaaacgg

SEQ ID NO: 390 - DNA, 324 bp, Homo sapiens
gacatccagatgacccagtccccatcctccctgtctgcatctgtaggagaccgtgtcaccatcacttgccgggcaagtcagaatattaatttttggttacggtggtaccagcagaaaccagggaaagcccctacgctcctgatctatgatgcttcccagccccagagtggggtcccatcaaggttcagtggcagtggatctgggacagatttcactctcaccatcagcagtctgcaacctgaagattttgctacgtactactgtcaacaggattttatgttccctctgacgttcggccaagggaccaaggtggaaatcaaacgg

SEQ ID NO: 391 - DNA, 324 bp, Homo sapiens
gacatccagatgacccagtccccatcctccctgtctgcatctgtaggagaccgtgtcaccatcacttgccgggcaagtcagaatattaatttttggttacggtggtaccagcagaaaccagggaaagcccctacgctcctgatctatgatgcttcccagccccagagtggggtcccatcaaggttcagtggcagtggatctgggacagatttcactctcaccatcagcagtctgcaacctgaagattttgctacgtactactgtcaacaggatttttcgcagcctttcacgttcggccaagggaccaaggtggaaatcaaacgg

SEQ ID NO: 392 - DNA, 324 bp, Homo sapiens
gacatccagatgacccagtccccatcctccctgtctgcatctgtaggagaccgtgtcaccatcacttgccgggcaagtcagaatattaatttttggttacggtggtaccagcagaaaccagggaaagcccctacgctcctgatctatgatgcttcccagccccagagtggggtcccatcaaggttcagtggcagtggatctgggacagatttcactctcaccatcagcagtctgcaacctgaagattttgctacgtactactgtcaacaggatttaatgcctccttatacgttcggccaagggaccaaggtggaaatcaaacgg

SEQ ID NO: 393 - DNA, 323 bp, Homo sapiens
gacatccagatgacccagtcaccatcctccctgtctgcatctgtaggagaccgtgtcaccatcacttgccgggcaagtcagagtattaatttttggttacggtggtaccagcagaaaccagggaaagcccctacgcttctgatctatgatgcttcccgcacgcagagtggggtcccatcaaggttcagtggcagtgggtctgggacagatttcactctcaccatcagcagtctgcaacctgaagattttgctacgtactactgtcaacaggattttatgaaccctttcacgttcggccaagggaccaaggtggaaataaacgg

SEQ ID NO: 394 - DNA, 324 bp, Homo sapiens
gacatccagatgacccagtcaccatcctccctgtctgcatctgtaggagaccgtgtcaccatcacttgccgggcaagtcagagtattaatttttggttacggtggtaccagcagaaaccagggaaagcccctacgcttctgatctatgatgcttcccgcacgcagagtggggtcccatcaaggttcagtggcagtggatctgggacagatttcactctcaccatcagcagtctgcaacctgaagattttgctacgtactactgtcaacaggattttcacttgcctttcacgttcggccaagggaccaaggtggagatcaaacgg

SEQ ID NO: 395 - DNA, 324 bp, Homo sapiens
gacatccagatgacccagtcaccatcctccctgtctgcatctgtaggagaccgtgtcaccatcacttgccgggcaagtcagagtattaatttttggttacggtggtaccagcagaaaccagggaaagcccctacgcttctgatctatgatgcttcccgcacgcagagtggggtcccatcaaggttcagtggcagtggatctgggacagatttcactctcaccatcagcagtctgcaacctgaagattttgctacgtactactgtcaacaggattttatgttccctctgacgttcggccaagggaccaaggtggaaatcaaacgg

SEQ ID NO: 396 - DNA, 324 bp, Homo sapiens
gacatccagatgacccagtcaccatcctccctgtctgcatctgtaggagaccgtgtcaccatcacttgccgggcaagtcagagtattaatttttggttacggtggtaccagcagaaaccagggaaagcccctacgcttctgatctatgatgcttcccgcacgcagagtggggtcccatcaaggttcagtggcagtggatctgggacagatttcactctcaccatcagcagtctgcaacctgaagattttgctacgtactactgtcaacaggatttttcgcagcctttcacgttcggccaagggaccaaggtggaaatcaaacgg

SEQ ID NO: 397 - DNA, 324 bp, Homo sapiens
gacatccagatgacccagtcaccatcctccctgtctgcatctgtaggagaccgtgtcaccatcacttgccgggcaagtcagagtattaatttttggttacggtggtaccagcagaaaccagggaaagcccctacgcttctgatctatgatgcttcccgcacgcagagtggggtcccatcaaggttcagtggcagtggatctgggacagatttcactctcaccatcagcagtctgcaacctgaagattttgctacgtactactgtcaacaggatttaatgcctccttatacgttcggccaagggaccaaggtggaaatcaaacgg

SEQ ID NO: 398 - DNA, 324 bp, Homo sapiens
gacatccagatgacccagtctccatcctccctgtctgcatctgtaggagaccgtgtcaccatcacttgccacgcgagccagaatattaatttttggttacggtggtatcagcagaaaccagggaaagcccctacgctcctgatctatgatgcttcccgcagccagagtggggtcccatcacgtttcagtggcagtggatctgggacagatttcactctcaccatcagcagtctgcaacctgaagattttgctacgtactactgtcaacaggatttaatgcctccttatacgttcggccaagggaccaaggtggaaatcaaacgg

SEQ ID NO: 399 - DNA, 324 bp, Homo sapiens
gacatccagatgacccagtttccatcctccctgtctgcatctgtaggagaccgtgtcaccatcacttgcaccaccgaccagaatattaatttttggttacggtggtatcagcagaaaccagggaaagcccctacgctcctgatctatgatgcttcccgcagccagagtggggtcccatcacgtttcagtggcagtggatctgggacagatttcactctcaccatcagcagtctgcaacctgaagattttgctacgtactactgtcaacaggatttaatgcctccttatacgttcggccaagggaccaaggtggaaatcaaacgg

SEQ ID NO: 400 - DNA, 324 bp, Homo sapiens
gacatccagatgacccagtccccatcctccctgtctgcatctgtaggagaccgtgtcaccatcacttgcgcggccagccagaatactaatttttggttacggtggtaccagcagaaaccagggaaagcccctacgctcctgatctatgatgcttcccgcagccagagtggggtcccatcacgtttcagtggcagtggatctgggacagatttcactctcaccatcagcagtctgcaacctgaagattttgctacgtactactgtcaacaggatttaatgcctccttatacgttcggccaagggaccaaggtggaaatcaaacgg

SEQ ID NO: 401 - DNA, 324 bp, Homo sapiens
gacatccagatgacccagtccccatcctccctgtctgcatctgtaggagaccgtgtcaccatcacttgcaacaccacccagaatattaatttttggttacggtggtaccagcagaaaccagggaaagcccctaagctcctgatctatgatgcttcccgcagccagagtggggtcccatcacgtttcagtggcagtggatctgggacagatttcactctcaccatcagcagtctgcaacctgaagattttgctacgtactactgtcaacaggatttaatgcctccttatacgttcggccaagggaccaaggtggaaatcaaacgg

SEQ ID NO: 402 - DNA, 324 bp, Homo sapiens
gacatccagatgacccagtctccatcctccctgtctgcatctgtaggagaccgtgtcaccatcacttgccgggcaagtacctcgatcaatttttggttacggtggtaccagcagaaaccagggaaagcccctacgctcctgatctatgatgcttcccgcagccagagtggggtcccatcacgtttcagtggcagtggatctgggacagatttcactctcaccatcagcagtctgcaacctgaagattttgctacgtactactgtcaacaggatttaatgcctccttatacgttcggccaagggaccaaggtggaaatcaaacgg

SEQ ID NO: 403 - DNA, 324 bp, Homo sapiens
gacatccagatgacccagtctccatcctccctgtctgcatctgtaggagaccgtgtcaccatcacttgccgggcaagtctccccctcaatttttggttacggtggtaccagcagaaaccagggaaagcccctacgctcctgatctatgatgcttcccgcagccagagtggggtcccatcacgtttcagtggcagtggatctgggacagatttcactctcaccatcagcagtctgcaacctgaagattttgctacatactactgtcaacaggatttaatgcctccttatacgttcggccacgggaccaaggtggaaatcaaacgg

SEQ ID NO: 404 - DNA, 324 bp, Homo sapiens
gacatccagatgacccagtctccatcctccctgtctgcatctgtaggagaccgtgtcaccatcacttgcttcctgtcgcagaatattaatttttggttacggtggtaccagcagaaaccagggaaagcccctacgctcctgatctatgatgcttcccgcagccagagtggggtcccatcacgtttcagtggcagtggatctgggacagatttcactctcaccatcagcagtctgcaacctgaagattttgctacgtactactgtcaacaggatttaatgcctccttatacgttcggccaagggaccaaggtggaaatcaaacgg

SEQ ID NO: 405 - DNA, 324 bp, Homo sapiens
gacatccagatgacccagtctccatcctccctgtctgcatctgtaggagaccgtgtcaccatcacttgcaccaccacccagaatattaatttttggttacggtggtaccagcagaaaccagggaaagcccctacgctcctgatctatgatgcttcccgcagccagagtggggtcccatcacgtttcagtggcagtggatctgggacagatttcactctcaccatcagcagtctgcaacctgaagattttgctacgtactactgtcaacaggatttaatgcctccttatacgttcggccaagggaccaaggtggaaatcaaacgg

SEQ ID NO: 406 - DNA, 324 bp, Homo sapiens
gacatccagatgacccagtctccatcctccctgtctgcatctgtaggagaccgtgtcaccatcacttgccggcccaaccagaatattaatttttggttacggtggtaccagcagaaaccagggaaagcccctacgctcctgatctatgatgcttcccgcagccagagtggggtcccatcacgtttcagtggcagtggatctgggacagatttcactctcaccatcagcagtctgcaacctgaagattttgctacgtactactgtcaacaggatttaatgcctccttatacgttcggccaagggaccaaggtggaaatcaaacgg

SEQ ID NO: 407 - DNA, 324 bp, Homo sapiens
gacatccagatgacccagtctccatcctccctgtctgcatctgtaggagaccgtgtcaccatcacttgccacaccacccagaatattaatttttggttacggtggtaccagcagaaaccagggaaagcccctacgctcctgatctatgatgcttcccgcagccagagtggggtcccatcgcgtttcagtggcagtggatctgggacagatttcactctcaccatcagcagtctgcaacctgaagattttgctacgtactactgtcaacaggatttaatgcctccttatacgttcggccaagggaccaaggtggaaatcaaacgg

SEQ ID NO: 408 - DNA, 324 bp, Homo sapiens
gacatccagatgacccagtctccatcctccctgtctgcatctgtaggagaccgtgtcaccatcacttgcgtgtgggggcagaatattaatttttggttacggtggtaccagcagaaaccagggaaagcccctacgctcctgatctatgatgcttcccgcagccagagtggggtcccatcacgtttcagtggcagtggatctgggacagatttcactctcaccatcagcagtctgcaacctgaagattttgctacgtactactgtcaacaggatttaatgcctccttatacgttcggccaagggaccaaggtggaaatcaaacgg

SEQ ID NO: 409 - DNA, 324 bp, Homo sapiens
gacatccagatgacccagtctccatcctccctgtctgcatctgtaggagaccgtgtcaccatcacttgccacagcacgcagaatattaatttttggttacggtggtaccagcagaaaccagggaaagcccctacgctcctgatctatgatgcttcccgcagccagagtggggtcccatcacgtttcagtggcagtggatctgggacagatttcactctcaccatcagcagtctgcaacctgaagattttgctacgtactactgtcaacaggatttaatgcctccttatacgttcggccaagggaccaaggtggaaatcaaacgg

SEQ ID NO: 410 - DNA, 324 bp, Homo sapiens
gacatccagatgacccagtctccatcctccctgtctgcatctgtaggagaccgtgtcaccatcacttgccgggcaagtacccccacgaatttttggttacggtggtaccggcagaaaccagggaaagcccctacgctcctgatctatgatgcttcccgcagccagagtggggtcccatcacgtttcagtggcagtggatctgggacagatttcactctcaccatcagcagtctgcaacctgaagattttgctacgtactactgtcaacaggatttaatgcctccttatacgttcggccaagggaccaaggtggaaatcaaacgg

SEQ ID NO: 411 - DNA, 324 bp, Homo sapiens
gacatccagatgacccagtccccatcctccctgtctgcatctgtaggagaccgtgtcaccatcacttgcaacatcaaccagaatattaatttttggttacggtggtaccagcagaaaccagggaaagcccctacgctcctgatctatgatgcttcccgcagccagagtggggtcccatcacgttttagtggcagtggatctgggacagatttcactctcaccatcagcagtctgcaacctgaagattttgctacgtactactgtcaacaggatttaatgcctccttatacgttcggccaagggaccaaggtggaaatcaaacgg

SEQ ID NO: 412 - DNA, 324 bp, Homo sapiens
gacatccagatgacccagtctccatcctccctgtctgcatctgtaggagaccgtgttaccatcacttgccgcccgacccagaatattaatttttggttacggtggtaccagcagaaaccagggaaagcccctacgctcctgatctatgatgcttcccgcagccagagtggggtcccatcacgtttcagtggcagtggatctgggacagatttcactctcaccatcagcagtctgcaacctgaagattttgctacgtactactgtcaacaggatttaatgcctccttatacgttcggccaagggaccaaggtggaaatcaaacgg

SEQ ID NO: 413 - DNA, 324 bp, Homo sapiens
gacatccagatgacccagtctccatcctccctgtctgcatctgtaggagaccgtgtcaccatcacttgccgggcaagtctctccatcaatttttggttacggtggtaccagcagaaaccagggaaagcccctacgctcctgatctatgatgcttcccgcagccagagtggggtcccatcacgtttcagtggcagtggatctgggacagatttcactctcaccatcagcagtctgcaacctgaagattttgctacgtactactgtcaacaggatttaatgcctccttatacgttcggccaagggaccaaggtggaaatcaaacgg

SEQ ID NO: 414 - DNA, 324 bp, Homo sapiens
gacatccagatgacccagtctccatcctccctgtctgcatctgtaggagaccgtgtcaccatcacttgccgggcaagttccttgctcaatttttggttacggtggtaccagcagaaaccagggaaagcccctacgctcctgatctatgatgcttcccgcagccagagtggggtcccatcacgtttcagtggcagtggatctgggacagatttcactctcaccatcagcagtctgcaacctgaagattttgctacgtactactgtcaacaggatttaatgcctccttatacgttcggccaagggaccaaggtggaaatcaaacgg

SEQ ID NO: 415 - DNA, 324 bp, Homo sapiens
  misc_feature 276, 279: n = A,T,C or G
gacatccagatgacccagtctccatcctccctgtctgcatctgtaggagaccgtgtcaccatcacttgccgggcaagtggggagttgaatttttggttacggtggtaccagcagaaaccagggaaagcccctacgctcctgatctatgatgcttcccgcagccagagtggggtcccatcacgtttcagtggcagtggatctgggacagatttcactctcaccatcagcagtctgcaacctgaagattttgctacgtactactgtcaacaggatctnatngtcccttttacgttcggccaagggaccaaggtggaaatcaaacgg

SEQ ID NO: 416 - DNA, 324 bp, Homo sapiens
gacatccagatgacccagtctccatcctccctgtctgcatctgtaggagaccgtgtcaccatcacttgcaacaccaaccagaatattaatttttggttacggtggtaccagcagaaaccagggaaagcccctacgctcctgatctatgatgcttcccgcagccagagtggggtcccatcacgtttcagtggcagtggatctgggacagatttcactctcaccatcagcagtctgcaacctgaagattttgctacgtactactgtcaacaggatttaatgcctccttatacgttcggccaagggaccaaggtggaaatcaaacgg

SEQ ID NO: 417 - DNA, 324 bp, Homo sapiens
gacatccagatgacccagtctccatcctccctgtctgcatctgtaggagaccgtgtcaccatcacttgccgggcaagtaagtccgtcaatttttggttacggtggtaccagcagaaaccagggaaagcccctacgctcctgatctatgatgcttcccgcagccagagtggggtcccatcacgtttcagtggcagtggatctgggacagatttcactctcaccatcagcagtctgcaacctgaagattttgctacgtactactgtcaacaggatttaatgcctccttatacgttcggccaagggaccaaggtggaaatcaaacgg

SEQ ID NO: 418 - DNA, 324 bp, Homo sapiens; identical to SEQ ID NO: 412

SEQ ID NO: 419 - DNA, 324 bp, Homo sapiens
gacatccagatgacccagtctccatcctccctgtctgcatctgtaggagaccgtgtcaccatcacttgcaacaccaagcagaatattaatttttggttacggtggtaccagcagaaaccagggaaagcccctacgctcctgatcgatgatgcttcccgcagccagagcggggtcccatcacgtttcagtggcagtggatctgggacagatttcactctcaccatcagcagtctgcaacccgaagattttgctacgtactactgtcaacaggatttagtgcctccttatacgttcggccaagggaccaaggtggaaatcaaacgg

SEQ ID NO: 420 - DNA, 324 bp, Homo sapiens
gacatccagatgacccagtctccatcctccctgtctgcatctgtaggagaccgtgtcaccatcacttgcttcctgtcgcagaatattaatttttggttacggtggtaccagcagaaaccaggtaaagcccctacgctcctgatctatgatgcttcccgcagccagagtggggtcccatcacgtttcagtggcagtggatctgggacagatttcactctcaccatcagcagtctgcaacctgaagattttgctacgtactactgtcaacaggatttaatgcctccttatacgttcggccaagggaccaaggtggaaatcaaacgg

SEQ ID NO: 421 - DNA, 324 bp, Homo sapiens
gacatccagatgacccagtctccatcctccctgtctgcatctgtaggagaccgtgtcaccatcacttgccggacggggcagaatattaatttttggttacggtggtaccagcagaaaccagggaaagcccctacgctcctgatcgatgatgcttcccgcagccagagtggggtcccatcacgtttcagtggcagtggatctgggacagatttcactctcaccatcagcagtctgcaacctgaagattttgctacgtactactgtcaacaggatttaatgcctccttatacgttcggccaagggaccaaggtggaaatcaaacgg

SEQ ID NO: 422 - DNA, 324 bp, Homo sapiens
gacatccagatgacccagtctccatcctccctgtctgcatctgtaggagaccgtgtcaccatcacttgccgggcaagttggtccatcaatttttggttacggtggtaccagcagaaaccagggaaagcccctacgctcctgatctatgatgcttcccgcagccagagtggggtcccatcacgtttcagtggcagtggatctgggacagatttcactctcaccatcagcagtctgcaacctgaagattttgctacgtactactgtcaacaggatttaatgcctccttatacgttcggccaagggaccaaggtggaaatcaaacgg

SEQ ID NO: 423 - DNA, 324 bp, Homo sapiens
gacatccagatgacccagtctccatcctccctgtctgcatctgtaggagaccgtgtcaccatcacttgccgggcaagttccccgctcaatttttggttacggtggtaccagcagaaaccagggaaagcccctacgctcctgatctatgatgcttcccgcagccagagtggggtcccatcacgtttcagtggcagtggatctgggacagatttcactctcaccatcaacagtctgcaacctgaagattttgctacgtactactgtcaacaggatttaatgcctccttatacgttcggccaagggaccaaggtggaaatcaaacgg

SEQ ID NO: 424 - DNA, 324 bp, Homo sapiens
gacatccagatgacccagtctccatcctccctgtctgcatctgtaggagaccgtgtcaccatcacttgccggacaagttcccccatcaatttttggttacggtggtaccagcagaaaccagggaaagcccctacgctcctgatctatgatgcttcccgcagccagagtggggtcccatcacgtttcagtggcagtggatctgggacagatttcactctcaccatcagcagtctgcaacctgaagattttgctacgtactactgtcaacaggatttaatgcctccttatacgttcggccaagggaccaaggtggaaatcaaacgg

SEQ ID NO: 425 - DNA, 324 bp, Homo sapiens
gacatccagatgacccagtctccatcctccctgtctgcatctgtaggagaccgtgtcaccatcacttgccgggcaagtcagtggattgggccgtatttaaattggtaccaacagaaaccagggaaagcccctaagcccctgatctatatggcgtcctatctgccaagtggggccccatcacgcttcagtggcagtggatctgggacagatttcactctcaccatcagcagtctgcaacctgaagattttgctacgtactactgtcaacaggatctttatcctccttttacgttcggccaagggaccaaggtggaaatcaaacgg

SEQ ID NO: 426 - DNA, 324 bp, Homo sapiens
gacatccagatgacccagtctccatcctccctgtctgcatctgtaggagaccgtgtcaccatcacttgccgggcaagtcagaagattggtccgtatttacagtggtaccagcagaaaccagggaaagcccctaagctcctgatctattctgcgtccgttttgcaaagcggggtcccatcacgtttcagtggcagtggatctgggacagttttcactctcaccatcagcagtctgcaacctgaagatttcgctacgtactactgtcaacagggtattaatccgcctaggacgttcggccaagggaccaaggtggaaatcaaacgg

SEQ ID NO: 427 - DNA, 324 bp, Homo sapiens
gacatccagatgacccagtctccatcctccctgtctgcatctgtaggagaccgtgtcaccatcacttgccgggcaagtcagtggattgggccgtatttaaattggtaccaacagaaaccagggaaagcccctaagcccctgatctatatggggtggcactacccaagtggggtcccatcacgcttcagtggcagtggatctgggacagatttcactctcaccatcagcagtctgcaacctgaagattttgctacgtactactgtcaacaggatctttatcctccttttacgttcggccaagggaccaaggtggaaatcaaacgg

SEQ ID NO: 428 - DNA, 324 bp, Homo sapiens
gacatccagatgacccagtctccatcctccctgtctgcatctgtaggagaccgtgtcaccatcacttgccgggcaagtcagtggattgggccgtatttaaattggtaccaacagaaaccagggaaagcccctaagcccctgatctatatggggtcccacaacgtggagggggtcccatcacgcttcagtggcagtggatctgggacagatttcactctcaccatcagcagtctgcaacctgaagattttgctacgtactactgtcaacaggatctttatcctccttttacgttcggccaagggaccaaggtggaaatcaaacgg

SEQ ID NO: 429 - DNA, 324 bp, Homo sapiens
gacatccagatgacccagtctccatcctccctgtctgcatctgtaggagaccgtgtcaccatcacttgccgggcaagtcagtggattgggccgtatttaaattggtaccaacagaaaccagggaaagcccctaagcccctgatctattccagctggtatctgccaagtggggtcccatcacgcttcagtggcagtggatctgggacagatttcactctcaccatcagcagtctgcaacctgaagattttgctacgtactactgtcaacaggatctttatcctccttttacgttcggccaagggaccaaggtggaaatcaaacgg

SEQ ID NO: 430 - DNA, 324 bp, Homo sapiens
gacatccagatgacccagtctccatcctccctgtctgcatctgtaggagaccgtgtcaccatcacttgccgggcaagtcagtggattgggccgtatttaaattggtaccaacagaaaccagggaaagcccctaagcccctgatctatatggggtcctataaggggaggggggtcccatcacgcttcagtggcagtggatctgggacagatttcactctcaccatcagcagtctgcaacctgaagattttgctacgtactactgtcaacaggatctttatcctccttttacgttcggccaagggaccaaggtggaaatcaaacgg

SEQ ID NO: 431 - DNA, 324 bp, Homo sapiens
gacatccagatgacccagtctccatcctccctgtctgcatctgtaggagaccgtgtcaccatcacttgccgggcaggtcagaatattaatttttggttacggtggtaccagcagaaaccagggaaagcccctgcgctcctgatctatgatgcttccgagagccagagtggggtcccatcacgtttcagtggcagtggatctgggacagatttcactctcaccatcagcagtctgcaacctgaagattttgctacgtactactgtcaacaggatttaatgcctccttatacgttcggccaagggaccaaggtggaaatcaaacgg

SEQ ID NO: 432 - DNA, 324 bp, Homo sapiens
gacatccagatgacccagtctccatcctccctgtctgcatctgtaggagaccgtgtcaccatcacttgccgggcaagtcagaatagtaatttttggttacggtggtatcagcagaaaccagggaaagcccctacgctcctgatctatgatgcttcccgcagcgggagtggggtcccatcacgtttcagtggcagtggatctgggacagatttcactctcaccatcagcagtctgcaacctgaagattttgctacgtactactgtcaacaggatttaatgcctccttatacgttcggccaagggaccaaggtggaaatcaaacgg

SEQ ID NO: 433 - DNA, 324 bp, Homo sapiens
gacatccagatgacccagtctccatcctccctgtctgcatctgtaggagaccgtgtcaccatcacttgccgggcaagtcagaatattaatttttggttacggtggtaccagcagaaaccagggaaagcccctacgctcctgatctatgatgcttcccgcagccagccgggggtcccatcacgtttcagtggcagtggatctgggacagatttcactctcaccatcagcagtctgcaacctgaagattttgctacgtactactgtcaacaggatttaatgcctccttatacgttcggccaagggaccaaggtggaaatcaaacgg

SEQ ID NO: 434 - DNA, 324 bp, Homo sapiens
gacatccagatgacccagtctccatcctccctgtctgcatctgtaggagaccgtgtcaccatcacttgccgggcaagtcagaatattaatttttggttacggtggtatcagcagaaaccagggaaagcccctacgctcctgatctatgatgcttcccgcagccaggggggggtcccatcacgtttcagtggcagtggatctgggacagatttcactctcaccatcagcagtctgcaacctgaagattttgctacgtactactgtcaacaggatttaatgcctccttatacgttcggccaagggaccaaggtggaaatcaaacgg

SEQ ID NO: 435 - DNA, 324 bp, Homo sapiens
gacatccagatgacccagtctccatcctccctgtctgcatctgtaggagaccgtgtcaccatcacttgccgggcaagtcagaatattaatttttggttacggtggtaccagcagaaaccagggaaagcccctacgctcctgatctatgatgcttcccgcagccagagtggggtcccatcacgtttcagtggcagtggatctgggacagatttcactctcaccatcagcagtctgcaacctgaagattttgctacgtactactgtcaacaggatttaaggcctccttatacgttcggccaagggaccaaggtggaaatcaaacgg

SEQ ID NO: 436 - DNA, 324 bp, Homo sapiens
gacatccagatgacccagtctccatcctccctgtctgcatctgtaggagaccgtgtcaccatcacttgccgggcaagtcagaatattaatttttggttacggtggtaccagcagaaaccagggaaagcccctacgctcctgatctatgatgcttcccgcagccagagtggggtcccatcacgtttcagtggcagtggatctgggacagatttcactctcaccatcagcagtctgcaacctgaagattttgctacgtactactgtcaacaggatttatggcctccttatacgttcggccaagggaccaaggtggaaatcaaacgg

SEQ ID NO: 437 - DNA, 324 bp, Homo sapiens
gacatccagatgacccagtctccatcctccctgtctgcatctgtaggagaccgtgtcaccatcacttgccgggcaagtcagaatattaatttttggttacggtggtaccagcagaaaccagggaaagcccctacgctcctgatctatgatgcttcccgcagccagagtggggtcccatcacgtttcagtggcagtggatctgggacagatttcactctcaccatcagcagtctgcaacctgaagattttgctacgtactactgtcaacaggatttagagcctccttatacgttcggccaagggaccaaggtggaaatcaaacgg

SEQ ID NO: 438 - DNA, 324 bp, Homo sapiens
gacatccagatgacccagtctccatcctccctgtctgcatctgtaggagaccgtgtcaccatcacttgccgggcaagtcagaatattaatttttggttacggtggtaccagcagaaaccagggaaagcccctacgctcctgatctatgatgcttcccgcagccagagtggggtcccatcacgtttcagtggcagtggatctgggacagatttcactctcaccatcagcagtctgcaacctgaagattttgctacgtactactgtcaacaggatttacgccctccttatacgttcggccaagggaccaaggtggaaatcaaacgg

SEQ ID NO: 439 - DNA, 324 bp, Homo sapiens
gacatccagatgacccagtctccatcctccctgtctgcatctgtaggagaccgtgtcaccatcacttgccgggcaagtcagaatattaatttttggttacggtggtaccagcagaaaccagggaaagcccctacgctcctgatctatgatgcttcccgcagccagagtggggtcccatcacgtttcagtggcagtggatctgggacagatttcactctcaccatcagcagtctgcaacctgaagattttgctacgtactactgtcaacaggatttaacccctccttatacgttcggccaagggaccaaggtggaaatcaaacgg

SEQ ID NO: 440 - DNA, 324 bp, Homo sapiens
gacatccagatgacccagtctccatcctccctgtctgcatctgtaggagaccgtgtcaccatcacttgccgggcaagtcagaatattaatttttggttacggtggtaccagcagaaaccagggaaagcccctacgctcctgatctatgatgcttcccgcagccagagtggggtcccatcacgtttcagtggcagtggatctgggacagatttcactctcaccatcagcagtctgcaacctgaagattttgctacgtactactgtcaacaggatttagggcctccttatacgttcggccaagggaccaaggtggaaatcaaacgg

SEQ ID NO: 441 - DNA, 324 bp, Homo sapiens
gacatccagatgacccagtctccatcctccctgtctgcatctgtaggagaccgtgtcaccatcacttgccgggcaagtcagaatattaatttttggttacggtggtaccagcagaaaccagggaaagcccctacgctcctgatctatgatgcttcccgcagccagagtggggtcccatcacgtttcagtggcagtggatctgggacagatttcactctcaccatcagcagtctgcaacctgaagattttgctacgtactactgtcaacaggatttatgccctccttatacgttcggccaagggaccaaggtggaaatcaaacgg

SEQ ID NO: 442 - DNA, 324 bp, Homo sapiens
gacatccagatgacccagtctccatcctccctgtctgcatctgtaggagaccgtgtcaccatcacttgccgggcaagtcagaatattaatttttggttacggtggtaccagcagaaaccagggaaagcccctacgctcctgatctatgatgcttcccgcagccagagtggggtcccatcacgtttcagtggcagtggatctgggacagatttcactctcaccatcagcagtctgcaacctgaagattttgctacgtactactgtcaacaggatttaatgcctcctagcacgttcggccaagggaccaaggtggaaatcaaacgg

SEQ ID NO: 443 - DNA, 324 bp, Homo sapiens
gacatccagatgacccagtctccatcctccctgtctgcatctgtaggagaccgtgtcaccatcacttgccgggcaagtcagatgattgagtggcatttagattggtaccagcagaaaccagggaaagcccctaggctcctgatctatgatatttccaagttgcaaagtggggtcccatcacgtttcagtggcagtggatctgggacagatttcactctcaccatcagcagtctgcaacctgaagattttgctacgtactactgtcaacagtatgagattcctcctgtgacgttcggccaagggaccaaggtggagatcaaacgg

SEQ ID NO: 444 - DNA, 324 bp, Homo sapiens
gacatccagatgacccagtctccatcctccctgtctgcatctgtaggagaccgtgtcaccatcacttgccggacaagtcaggatattaattcgtggttaaattggtatcagcagaaaccagggaaagcccctaagctcctgatctatctggcttcctcgttgcaaagtggggtcccaccacgtttcagtggcagtggatctgggacagatttcactctcaccatcagcagtctgcaacctgaagattttgctacgtactactgtcaacagtatatgcttgagccttatacgttcggccaagggaccaaggtggaaatcaaacgg

SEQ ID NO: 445 - DNA, 324 bp, Homo sapiens
gacatccagatgacccagtctccatcctccctgtctgcatctgtaggagaccgtgtcaccatcacttgccgggcaagtcaggatattggtgagtatttagcttggtaccagcagaaaccagggaaagcccctaagctcctgatctattatatttccaggttgcaaagtggggtcccatcacgtttcagtggcagtggatctgggacagatttcactctcaccatcagcagtctgcaacctgaagattttgctacgtactactgtcaacagctgatggattttccttttacgttcggccaagggaccaaggtggaaatcaaacgg

SEQ ID NO: 446 - DNA, 324 bp, Homo sapiens
gacatccagatgacccagtctccatcctccctgtctgcatctgtaggagaccgtgtcaccatcacttgccgggcaagtcaggatattggggattggttagggtggtaccagcagaaaccagggaaagcccctaagctcctgatctatctggggtccatgttgcaaagtggagtcccatcacgtttcagtggcagtggatctgggacagatttcactctcaccatcagcagtctgcaacctgaagattttgctacgtactactgtcaacagtttaatgttatgccttttacgttcggccaagggaccaaggtggaaatcaaacgg

SEQ ID NO: 447 - DNA, 324 bp, Homo sapiens
gacatccagatgacccagtctccatcctccctgtctgcatctgtaggagaccgtgtcaccatcacttgccgggcaagtcgtcgtattgttgatatgttagattggtaccagcagaaaccagggaaagcccctaagctcctgatcgctggtggttccgtgttgcaaagtggggtcccatcacgtttcagtggcagtggatctgggacagatttcactctcaccatcagcagtctgcaacctgaagattttgctacgtactactgtggtcagtatgcggcttatcctcctacgtttggccaagggaccaaggtggaaatcaaacgg

SEQ ID NO: 448 - DNA, 324 bp, Homo sapiens
gacatccagatgacccagtctccatcctccctgtctgcatctgtaggagaccgtgtcaccatcacttgccgggcaagtcgttatattgctgatgggttagattggtaccagcagaaaccagggaaagcccctatgctcctgatcgtgggtggttccggtttgcaaagtggggtcccatcacgtttcagtggcagtggatctgggacagatttcactctcaccatcagcagtctgcaacctgaagattttgctacgtactactgtgcgcagtggtgggagtatcctgctacgttcggccaagggaccaaggtggaaatcaaacgg

SEQ ID NO: 449 - DNA, 324 bp, Homo sapiens
gacatccagatgacccagtctccatcctccctgtctgcatctgtaggagaccgtgtcaccatcacttgccgggcaagtacgaatatttggacgcatttagattggtaccagcagaaaccagggaaagcccctaagctcctgatcgctggtgtttcccggttgcaaagtggggtcccatcacgtttcagtggcagtggatctgggacagatttcactctcaccatcagcagtctgcaacctgaagattttgctacgtactactgtgcgcagtttgcggggtatcctgtgacgttcggccaagggaccaaggtggaaatcaaacgg

SEQ ID NO: 450 - DNA, 324 bp, Homo sapiens
gacatccagatgacccagtctccatcctccctgtctgcatctgtaggagaccgtgtcaccatcacttgccgggcaagtcgtaatattgatattatgttagattggtaccagcagaaaccagggaaagctcctaagctcctgatcgggagtgggtccggtttgcaaagtggggtcccatcacgtttcagtggcagtggatctgggacagatttcactctcaccatcagcagtctgcaacctgaagattttgctacgtactactgtggtcagtatgcggcttatcctcctacgtttggccaagggaccaaggtggaaatcaaacgg

SEQ ID NO: 451 - DNA, 324 bp, Homo sapiens
gacatccagatgacccagtctccatcctccctgtctgcatctgtaggagaccgtgtcaccatcacttgccgggcaagtcttgatattggtgattggttacattggtaccagcagaaaccagggaaagcccccaagctcctgatcgggtggggttccgggttgcaaagtggggtcccatcacgtttcagtggcagtgggtctgggacagatttcactctcaccatcagcagtctgcaacctgaagattttgctacgtactactgtttgcaggaggggttgggtcctccgacgttcggccaagggaccaaggtggaaatcaaacgg

SEQ ID NO: 452 - DNA, 324 bp, Homo sapiens
gacatccagatgacccagtctccatcctccctgtctgcatctgtaggagaccgtgtcaccatcacttgccgggcaagtcttgatattggtgattggttacattggtaccagcagaaaccagggaaagcccccaagctcctgatcgggtggggttccgggttgcaaagtggggtcccatcacgtttcagtggcagtgggtctgggacagatttcactctcaccatcagcagtctgcaacctgaagattttgctacgtactactgtttgcaggaggggtggggtcctccgacgttcggccaagggaccaaggtggaaatcaaacgg

SEQ ID NO: 453 - DNA, 324 bp, Homo sapiens
gacatccagatgacccagtcaccatcctccctgtctgcatctgtaggagaccgtgtcaccatcacttgccgggcaagtcttgatattggtgattggttacattggtaccagcagaaaccagggaaagcccccaagctcctgatcgcgtgggcgtccttgttgcccagtggggtcccatcacgtttcagtggcagtgggtctgggacagatttcactctcaccatcagcagtctgcaacccgaagattttgctacgtactactgtttgcaggaggggtggggtcctccgacgttcggccaagggaccaaggtggaaatcaaacgg

SEQ ID NO: 454 - DNA, 324 bp, Homo sapiens
gacatccagatgacccagtcaccatcctccctgtctgcatctgtaggagaccgtgtcaccatcacttgccgggcaagtcttgatattggtgattggttacattggtaccagcagaaaccagggaaagcccccaagctcctgatcgcctgggcgtccacgttggacagtggggtcccatcacgtttcagtggcagtgggtctgggacagatttcactctcaccatcagcagtctgcaacccgaagattttgctacgtactactgtttgcaggaggggtggggtcctccgacgttcggccaagggaccaaggtggaaatcaaacgg

SEQ ID NO: 455 - DNA, 324 bp, Homo sapiens
gacatccagatgacccagtcaccatcctccctgtctgcatctgtaggagaccgtgtcaccatcacttgccgggcaagtcttgatattggtgattggttacattggtaccagcagaaaccagggaaagcccccaagctcctgatcccgtgggcctccgggttgtggagtggggtcccatcacgtttcagtggcagtgggtctgggacagatttcactctcaccatcagcagtctgcaacctgaagattttgctacgtactactgtttgcaggaggggtggggtcctccgacgttcggccaagggaccaaggtggaaatcaaacgg

SEQ ID NO: 456 - DNA, 324 bp, Homo sapiens
gacatccagatgacccagtcaccatcctccctgtctgcatctgtaggagaccgtgtcaccatcacttgccgggcaagtcttgatattggtgattggttacattggtaccagcagaaaccaggggaagcccccaagctcctgatcagctgggcgtccacgttgccgagtggggtcccatcacgtttcagtggcagtgggtcggggacagatttcactctcaccatcagcagtctgcaacccgaagatttcgctacgtactactgtttgcaggaggggtggggtcctccgacgttcggccaagggaccaaggtggaaatcaaacgg

SEQ ID NO: 457 - DNA, 324 bp, Homo sapiens
gacatccagatgacccagtcaccatcctccctgtctgcatctgtaggagaccgtgtcaccatcacttgccgggcaagtcgcaacattggcgactggttacattggtatcagcagaaaccagggaaagcccccaagctcctgatcgcctgggcgtccacgttggacagtggggtcccatcacgtttcagtggcagtgggtctgggacagatttcactctcaccatcagcagtctgcaacccgaagattttgctacgtactactgtttgcaggaggggtggggtcctccgacgttcggccaagggaccaaggtggaaatcaaacgg

SEQ ID NO: 458 - DNA, 324 bp, Homo sapiens
gacatccagatgacccagtcaccatcctccctgtctgcatctgtaggagaccgtgtcaccatcacttgccgggcaagtcttgatattggtgattggttacattggtaccagcagaaaccagggaaagcccccaagctcctgatcagctgggcgtccacgttggacagtggggtcccatcacgtttcagtggcagtgggtctgggacagatttcactctcaccatcagcagtctgcaacccgaagattttgctacgtactactgtttgcaggaggggtggggtcctccgacgttcggccaagggaccaaggtggaaatcaaacgg

SEQ ID NO: 459 - DNA, 324 bp, Homo sapiens
gacatccagatgacccagtcaccatcctccctgtctgcatctgtaggagaccgtgtcaccatcacttgccgggcaagtcttgatattggtgattggttacattggtatcagcagaaaccagggaaagcccccaagctcctgatcagctgggcgtccacgttgccgagtggggtcccatcacgtttcagtggcagtgggtcggggacagatttcactctcaccatcagcagtctgcaacccgaagatttcgctacgtactactgtttgcaggaggggtggggtcctccgacgttcggccaagggaccaaggtggaaatcaaacgg

SEQ ID NO: 460 - DNA, 324 bp, Homo sapiens
gacatccagatgacccagtcaccatcctccctgtctgcatctgtaggagaccgtgtcaccatcacttgccgggcaagtaggtcgattggcgactggttacattggtatcagcagaaaccagggaaagcccccaagctcctgatcgcctgggcgtccacgttggacagtggggtcccatcacgtttcagtggcagtgggtctgggacagatttcactctcaccatcagcagtctgcaacctgaagatttcgctacgtactactgtttgcaggaggggtggggtcctccgacgttcggccaagggaccaaggtggaaatcaaacgg

SEQ ID NO: 461 - DNA, 324 bp, Homo sapiens
gacatccagatgacccagtcaccatcctccctgtctgcatctgtaggagaccgtgtcaccatcacttgccgggcaagtcgccccattgccgactggttacattggtatcagcagaaaccagggaaagcccccaagctcctgatcgcctgggcgtccacgttggacagtggggtcccatcacgtttcagtggcagtgggtctgggacagatttcactctcaccatcagcagtctgcaacccgaagatttcgctacgtactactgtttgcaggaggggtggggtcctccgacgttcggccaagggaccaaggtggaaatcaaacgg

SEQ ID NO: 462 - DNA, 324 bp, Homo sapiens
gacatccagatgacccagtcaccatcctccctgtctgcatctgtaggagaccgtgtcaccatcacttgccgggcaagtcttgatattggtgattggttacattggtaccagcagaaaccagggaaagcccccaagctcctgatcagctgggcgtccacgttgccgagtggggtcccatcacgtttcagtggcagtgggtcggggacagatttcactctcaccatcagcagtctgcaacccgaagatttcgctacgtactactgtttgcaggaggggtggggtcctccgacgttcggccaagggaccaaggtggaaatcaaacgg

SEQ ID NO: 463 - DNA, 324 bp, Homo sapiens
gacatccagatgacccagtcaccatcctccctgtctgcatctgtaggagaccgtgtcaccatcacttgccgggcaagtagggcgattagcgactggttacattggtatcagcagaaaccagggaaagcccccaagctcctgatcgcctgggcgtccacgttggacagtggggtcccatcacgtttcagtggcagtgggtctgggacagatttcactctcaccatcagcagtctgcaacctgaagatttcgctacgtactactgtttgcaggaggggtggggtcctccgacgttcggccaagggaccaaggtggaaatcaaacgg

SEQ ID NO: 464 - DNA, 324 bp, Homo sapiens
gacatccagatgacccagtcaccatcctccctgtctgcatctgtaggagaccgtgtcaccatcacttgccgggcaagtgcccccattagcgactggttacattggtaccagcagaaaccagggaaagcccccaagctcctgatcgcctgggcgtccacgttggacagtggggtcccatcacgtttcagtggcagtgggtctgggacagatttcactctcaccatcagcagtctgcaacccgaagattttgctacgtactactgtttgcaggaggggtggggtcctccgacgttcggccaagggaccaaggtggaaatcaaacgg

SEQ ID NO: 465 - DNA, 324 bp, Homo sapiens
gacatccagatgacccagtcaccatcctccctgtctgcatctgtaggagaccgtgtcaccatcacttgccgggcaagtcaccccattggggactggttacattggtatcagcagaaaccagggaaagcccccaagctcctgatcgcctgggcgtccacgttggacagtggggtcccatcacgtttcagtggcagtgggtctgggacagatttcactctcaccatcagcagtctgcaacctgaagattttgctacgtactactgtttgcaggaggggtggggtcctccgacgttcggccaagggaccaaggtggaaatcaaacgg

SEQ ID NO: 466 - DNA, 324 bp, Homo sapiens
gacatccagatgacccaatcaccatcctccctgtctgcatctgtaggagaccgtgtcaccatcacttgccgggcaagtcgccccattagcgactggttacattggtatcagcagaaaccagggaaagcccccaagctcctgatcgcctgggcgtccacgttggacagtggggtcccatcacgtttcagtggcagtgggtcggggacagatttcactctcaccatcagcagtctgcaacccgaagatttcgctacgtactactgtttgcaggaggggtggggtcctccgacgttcggccaagggaccaaggtggaaatcaaacgg

SEQ ID NO: 467 - DNA, 324 bp, Homo sapiens
  misc_feature 107: n = A,T,C or G
gacatccagatgacccaatcaccatcctccctgtctgcatctgtaggagaccgtgtcaccatcacttgccgggcaagtcttgatattggtgactggttacattggtnccagcagaaaccagggaaagccccccagctcctgatcgcctgggcgtccacgtcggacagtggggtcccatcacgtttcagtggcagtgggtcggggacagatttcactctcaccatcagcagtctgcaacccgaagatttcgctacgtactactgtttgcaggaggggtggggtcctccgacgttcggccaagggaccaaggtggaaatcaaacgg

SEQ ID NO: 468 - DNA, 324 bp, Homo sapiens
  misc_feature 107: n = A,T,C or G
gacatccagatgacccaatcaccatcctccctgtctgcatctgtaggagaccgtgtcaccatcacttgccgggcaagtcttgatattagggattggttacattggtnccagcagaaaccagggaaagcccccaagctcctgatcgcctgggcgtccacgttggacagtggggtcccatcacgtttcagtggcagtgggtcggggacagatttcactctcaccatcagcagtctgcaacccgaagatttcgctacgtactactgtttgcaggaggggtggggtcctccgacgttcggccaagggaccaaggtggaaatcaaacgg

SEQ ID NO: 469 - DNA, 324 bp, Homo sapiens
gacatccagatgacccaatcaccatcctccctgtctgcatctgtaggagaccgtgtcaccatcacttgccgggcaagtcgccccattagcgactggttacattggtatcagcagaaaccagggaaagcccccaagctcctgatcgcctgggcgtccacgttggacagtggggtcccatcacgtttcagtggcagggggtcggggacagatttcactctcaccatcagcagtctgcaacccgaagattttgctacgtactactgtttgcaggagtggtggggtcctccgacgttcggccaagggaccaaggtggaaatcaaacgg

SEQ ID NO: 470 - DNA, 324 bp, Homo sapiens
gacatccagatgacccaatcaccatcctccctgtctgcatctgtaggagaccgtgtcaccatcacttgccgggcaagtcgccccattagcgactggttacattggtatcagcagaaaccagggaaagcccccaagctcctgatcgcctgggcgtccacgttggacagtggggtcccatcacgtttcagtggcagtgggtcggggacagatttcactctcaccatcagcagtctgcaacccgaagattttgctacgtactactgtttgcagagcgggtggggtcctccgacgttcggccaagggaccaaggtggaaatcaaacgg

SEQ ID NO: 471 - DNA, 324 bp, Homo sapiens
gacatccagatgacccaatcaccatcctccctgtctgcatctgtaggagaccgtgtcaccatcacttgccgggcaagtcgccccattagcgactggttacattggtatcagcagaaaccagggaaagccccacggctcctgatctatacggcttcccgcagccagagtggggtcccatcacgtttcagtggcagtgggtcggggacagatttcactctcaccatcagcagtctgcaacccgaagattttgctacgtactactgtttgcaggaggggtggaagcctccgacgttcggccaagggaccaaggtggaaatcaaacgg

SEQ ID NO: 472 - DNA, 324 bp, Homo sapiens
gacatccagatgacccaatcaccatcctccctgtctgcatctgtaggagaccgtgtcaccatcacttgccgggcaagtcgcgggattagcgactggttacactggtaccagcagaaaccagggaaagcccccaagctcctgatcgcctgggcgtccacgttggacagtggggtcccatcacgtttcagtggcagtgggtcggggacagatttcactctcaccatcagcagtctgcaacccgaagatttcgctacgtactactgtttgcaggaggggtggggtcctccgacgttcggccaagggaccaaggtggaaatcaaacgg

SEQ ID NO: 473 - DNA, 324 bp, Homo sapiens
gacatccagatgacccaatcaccatcctccctgtctgcatctgtaggagaccgtgtcaccatcacttgccgggcaagtcgcaacattagcgactggttacattggtatcagcagaaaccagggaaagcccccaagctcctgatcgcctgggcgtccacgttggacagtggggtcccatcacgtttcagtggcagtgggtcggggacagatttcactctcaccatcagcagtctgcaacccgaagatttcgctacgtactactgtttgcaggaggggtggggtcctccgacgttcggccaagggaccaaggtggaaatcaaacgg

SEQ ID NO: 474 - DNA, 324 bp, Homo sapiens
gacatccagatgacccaatcaccatcctccctgtctgcatctgtaggagaccgtgtcaccatcacttgccgggcaagtcgcaacattagcgactggttacattggtatcagcagaaaccagggaaagcccccaggctcctgatcgcctgggcgtccacgttggacagtggggtcccatcacgtttcagtggcagtgggtcggggacagatttcactctcaccatcagcagtctgcaacccgaagatttcgctacgtactactgtttgcaggaggggtggggtcctccgacgttcggccaagggaccaaggtggaaatcaaacgg

SEQ ID NO: 475 - DNA, 324 bp, Homo sapiens
gacatccagatgacccaatcaccatcctccctgtctgcatctgtaggagaccgtgtcaccatcacttgccgggcaagtcgcaagattagcgactggttacattggtatcagcagaaaccagggaaagcccccaagctcctgatcgcctgggcgtccacgttggacagtggggtcccatcacgtttcagtggcagtgggtcggggacagatttcactctcaccatcagcagtctgcaacccgaagatttcgctacgtactactgtttgcaggaggggtggggtcctccgacgttcggccaagggaccaaggtggaaatcaaacgg

SEQ ID NO: 476 - DNA, 324 bp, Homo sapiens
gacatccagatgacccaatcaccatcctccctgtctgcatctgtaggagaccgtgtcaccatcacttgccgggcaagtgagcccattagcgactggttacattggtaccagcagaaaccagggaaagcccccaagctcctgatcgcctgggcgtccacgttggacagtggggtcccatcacgtttcagtggcagtgggtcggggacagatttcactctcaccatcagcagtctgcaacccgaagatttcgctacgtactactgtttgcaggaggggtggggtcctccgacgttcggccaagggaccaaggtggaaaccaaacgg

SEQ ID NO: 477 - DNA, 324 bp, Homo sapiens
gacatccagatgacccaatcaccatcctccctgtctgcatctgtaggagaccgtgtcaccatcacttgccgggcaagtcgccccattagcgactggttacattggtaccagcagaaaccagggaaagcccctaagctcctgatcgcctgggcgtccgtattggacagtggggtcccatcacgtttcagtggcagtgggtcggggacagatttcactctcaccatcagcagtctgcaacccgaagatttcgctacgtactactgtttgcaggaggggtggggtcctccgacgttcggccaagggaccaaggtggaaatcaaacgg

SEQ ID NO: 478 - DNA, 324 bp, Homo sapiens
gacatccagatgacccaatcaccatcctccctgtctgcatctgtaggagaccgtgtcaccatcacttgccgggcaagtcgccccattagcgactggttacattggtaccagcagaaaccagggaaagcccctaagctcctgatcgcctgggcgccaacgttggacagtggggtcccatcacgtttccgtggcagtgggtcggggacagatttcactctcaccatcagcagtctgcaacccgaagatttcgctacgtactactgtttgcaggaggggtggggtcctccgacgttcggccaagggaccaaggtggaaatcaaacgg

SEQ ID NO: 479 - DNA, 324 bp, Homo sapiens
gacatccagatgacccaatcaccatcctccctgtctgcatctgtaggagaccgtgtcaccatcacttgccgggcaagtcgccccattagcgactggttacattggtaccagcagaaaccagggaaagcccctaagctcctgatcgcctgggcgtccacgttggtcagtggggtcccatcacgtttcagtggcagtgggtcggggacagatttcactctcaccatcagcagtctgcaacccgaagatttcgctacgtactactgtttgcaggaggggtggggtcctccgacgttcggccaagggaccaaggtggaaatcaaacgg

SEQ ID NO: 480 - DNA, 324 bp, Homo sapiens
gacatccagatgacccaatcaccatcctccctgtctgcatctgtaggagaccgtgtcaccatcacttgccgggcaagtcgccccattagcgactggttacattggtatcagcagaaaccagggaaagcccccaagctcctgatcgcctgggcgtccacgttgctcagtggggtcccatcacgtttcagtggcagtgggtcggggacagatttcaccctcaccatcagcagtctgcaacccgaagatttcgctacgtactactgtttgcaggaggggtggggtcctccgacgttcggccaagggaccaaggtggaaatcaaacgg

SEQ ID NO: 481 - DNA, 324 bp, Homo sapiens
gacatccagatgacccaatcaccatcctccctgtctgcatctgtaggagaccgtgtcaccatcgcttgccgggcaagtcgccccattagcgactggttacattggtatcagcagaaaccagggaaagcccccaagctcctgatcgcctgggcgtccacgttgcaaagtggggtcccatcacgtttcagtggcagtgggtcggggacagatttcactctcaccatcagcagtctgcatcccgaagatttcgctacgtactactgtttgcaggaggggtggggtcctccgacgttcggccaagggaccaaggtggaaatcaaacgg

SEQ ID NO: 482 - DNA, 324 bp, Homo sapiens
gacatccagatgacccaatcaccatcctccctgtctgcatctgtaggagaccgtgtcaccatcacttgccgggcaagtcgccccattagcgactggttacattggtagcagcagaaaccagggaaagcccccaagctcctgatcgcctgggcgtccacgttgctgaatggggtcccatcacgtttcagtggcagtgggtcggggacagatttcactctcaccatcagcagtctgcaacccgaagatttcgctacgtactactgtttgcaggaggggtggggtcctccgacgttcggccaagggaccaaggtggaaatcaaacgg

SEQ ID NO: 483 - DNA, 324 bp, Homo sapiens
gacatccagatgacccaatcaccatcctccctgtctgcatctgtaggagaccgtgtcaccatcacttgccgggcaagtcgccccattagcgactggttacattggtaccagcagaaaccagggaaagcccccaagctcctgatcgcctgggcgtccacgttggtgagtggggtcccatcacgtttcagtggcagtgggtcggggacagatttcactctcaccatcagcagtctgcaacccgaagatttcgctacgtactactgtttgcaggaggggtggggtcctccgacgttcggccaagggaccaaggtggaaatcaaacgg

SEQ ID NO: 484 - DNA, 324 bp, Homo sapiens
gacatccagatgacccaatcaccatcctccctgtctgcatctgtaggagaccgtgtcaccatcacttgccgggcaagtcgccccattagcgactggttacattggtatcagcagaaaccagggaaagcccccaagctcctgatcgcctgggcgtccacgtcggacagtggggtcccatcacgtttcagtggcagtgggtcggggacagatttcactctcaccatcagcagtctgcaacccgaagatttcgctacgtactactgtttgcaggaggggtggggtcctccgacgttcggccaagggaccaaggtggaaatcaaacgg

SEQ ID NO: 485 - DNA, 324 bp, Homo sapiens
gacatccagatgacccaatcaccatcctccctgtctgcatctgtaggagaccgtgtcaccatcacttgccgggcaagtcgccccattagcgactggttacattggtaccagcagaaaccagggaaagcccctaagctcctgatcgcctgggcgtccacgttggaccttggggtcccatcacgtttcagtggcagtgggtcggggacagatttcactctcaccatcagcagtctgcaacccgaagatttcgctacgtactactgtttgcaggaggggtggggtcctccgacgttcggccaagggaccaaggtggaaatcaaacgg

SEQ ID NO: 486 - DNA, 324 bp, Homo sapiens
gacatccagatgacccaatcaccatcctccctgtctgcatctgtaggagaccgtgtcaccatcacttgccgggcaagtcgccccattagcgactggttacattggtatcagcagaaaccagggaaagcccccaagctcctgatcgcctgggcgtccacgttggaccagggggtcccatcacgtttcagtggcagtgggtcggggacagatttcactctcaccatcagcagtctgcaacccgaagatttcgctacgtactactgtttgcaggaggggtggggtcctccgacgttcggccaagggaccaaggtggaaatcaaacgg

SEQ ID NO: 487 - DNA, 324 bp, Homo sapiens
gacatccagatgacccaatcaccatcctccctgtctgcatctgtaggagaccgtgtcaccatcacttgccgggcaagtcgccccattagcgactggttacattggtaccagcagaaaccagggaaagcccctaagctcctgatcgcctgggcgtccacgttggacgacggggtcccatcacgtttcagtggcagtgggtcggggacagatttcactctcaccatcagcagtctgcaacccgaagatttcgctacgtactactgtttgcaggaggggtggggtcctccgacgttcggccaagggaccaaggtggaaatcaaacgg

SEQ ID NO: 488 - DNA, 324 bp, Homo sapiens
gacatccagatgacccaatcaccatcctccctgtctgcatctgtaggagaccgtgtcaccatcacttgccgggcaagtcgccccattagcgactggttacattggtaccagcagaaaccagggaaagcccctaagctcctgatcgcctgggcgtccacgttggaccatggggtcccatcacgtttcagtggcagtgggtcggggacagatttcactctcaccatcagcagtctgcaacccgaagatttcgctacgtactactgtttgcaggaggggtggggtcctccgacgttcggccaagggaccaaggtggaaatcaagcgg

SEQ ID NO: 489 - DNA, 324 bp, Homo sapiens
gacatccagatgacccaatcaccatcctccctgtctgcatctgtaggagaccgtgtcaccatcacttgccgggcaagtcgccccattagcgactggttacattggtatcagcagaaaccagggaaagcccccaagctcctgatcgcctgggcgtccacgttggacagtggggtcccatcacgtttcagtggcagtgggtcggggacagatttcactctcaccatcagcagtctgcaacccgaagatttcgctgcgtactactgtttgcaggaggggtggggtcctccgacgttcggccaagggaccaaggtggaaatcaaacgg

SEQ ID NO: 490 - DNA, 324 bp, Homo sapiens
gacatccagatgacccagtcaccatcctccctgccggcatctgtaggagaccgtgtcaccatcacttgccgggcaagtcttgatattggtgattggttacattggtaccagcagaaaccagggaaagcccccaagctcctgatcgcctgggcgtccacgttggacagtggggtcccatcacgtttcagtggcagtgggtctgggacagatttcactctcaccatcagcagtctgcaacccgaagattttgctacgtactactgtttgcaggaggggtggggtcctccgacgttcggccaagggaccaaggtggaaatcaaacgg

SEQ ID NO: 491 - DNA, 324 bp, Homo sapiens
gacatccagatgacccagtcaccatcctccctgtctgcatctgtaggagaccgtgtcaccatcacttgccgggcaagtcttgatattggtgattggttacattggtaccagcagaaaccagggaaagaccctaagctcctgatcgcctgggcgtccacgttggacagtggggtcccatcacgtttcagtggcagtgggtctgggacagatttcactctcaccatcagcagtctgcaacccgaagattttgctacgtactactgtttgcaggaggggtggggtcctccgacgttcggccaagggaccaaggtggaaatcaaacgg

SEQ ID NO: 492 - DNA, 324 bp, Homo sapiens
gacatccagatgacccagtcaccatcctccctgtctgcatctgtaggagaccgtgtcaccatcacttgccgggcaagtcttgatattggtgattggttacattggtaccagcagaaaccagggaaagcccccaagctcctgatcgcctgggcgtccacgttggacagtggggtcccatcacgtttcagtggcagtgggtctgggacagatttcactctcaccatcagcagtctgcaacccgaagattttgctacgtactactgtttgcagagcgggtggggtcctccgacgttcggccaagggaccaaggtggaaatcaaacgg

SEQ ID NO: 493 - DNA, 324 bp, Homo sapiens
gacatccagatgacccaatcaccatcctccctgccggcatctgtaggagaccgtgtcaccatcacttgccgggcaagtcgccccattagcgactggttacattggtatcagcagaaaccagggaaagcccccaagctcctgatcgcctgggcgtccacgttggacagtggggtcccatcacgtttcagtggcagtgggtcggggacagatttcactctcaccatcagcagtctgcaacccgaagatttcgctacgtactactgtttgcaggaggggtggggtcctccgacgttcggccaagggaccaaggtggaaatcaaacgg

SEQ ID NO: 494 - DNA, 324 bp, Homo sapiens
gacatccagatgacccagtctccatcctccctgtctgcatctgtaggagaccgtgtcaccatcacttgccgggcaagtaggcgtattggtaatgatttagtttggtaccagcagaaaccagggaaagcccctaagctcctgatcggtgggggttcccggttgcaaagtggggtcccatcacgtttcagtggcagtggatctgggacagatttcactctcaccatcagcagtctgcaacctgaagattttgctacgtactactgtgttcagttgtatcggctgcctgtgacgttcggccaagggaccaaggtggaaatcaaacgg

SEQ ID NO: 495 - DNA, 324 bp, Homo sapiens
gacatccagatgacccagtctccatcctccctgtctgcatctgtaggagaccgtgtcaccatcacttgccgggcaagtacgaatatttgggggggtttagattggtaccagcagaaaccagggaaagcccctaagctcctgatcggggcggtttccgagttgcaaagtggggtcccatcacgtttcagtggcagtggatctgggacagatttcactctcaccatcagcagtctgcaacctgaagattttgctacgtactactgtgggcagtgggctgtgtatcctcctacgttcggccaagggaccaaggtggaaatcaaacgg

SEQ ID NO: 496 - DNA, 324 bp, Homo sapiens
gacatccagatgacccagtctccatcctccctgtctgcatctgtaggagaccgtgtcaccatcacttgccgggcaagtaggcagatttggaatatgttagattggtaccagcagaaaccagggaaagcccctaagctcctgatcggtgggggttcccggttgcaaagtggggtcccatcacgtttcagtggcagtggatctgggacagatttcactctcaccatcagcagtctgcaacctgaagattttgctacgtactactgtgggcagtatgctgggtatcctgcgacgttcggccaagggaccaaggtggaaatcaaacgg

SEQ ID NO: 497 - DNA, 324 bp, Homo sapiens
gacatccagatgacccagtctccatcctccctgtctgcatctgtaggagaccgtgtcaccatcacttgccgggcaagtactaatattcatgatggtttagattggtaccagcagaaaccagggaaagcccctaagctcctgatctttgcgtcgtccgagttgcaaagtggggtcccatcacgtttcagtggcagtggatctgggacagatttcactctcaccatcagcagtctgcaacctgaagattttgctacgtactactgtgggcagtggttttcgtatcctgctacgttcggccaagggaccaaggtggaaatcaaacgg

SEQ ID NO: 498 - DNA, 324 bp, Homo sapiens
gacatccagatgacccagtctccatcctccctgtctgcatctgtaggagaccgtgtcaccatcacttgccgggcaagtcaggttattgatgatgatttaagttggtaccagcagaaaccagggaaagcccctaagctcctgatcggggttgggtcctggttgcaaagtggggtcccatcacgtttcagtggcagtggatctgggacagatttcactctcaccatcagcagtctgcaacctgaagattttgctacgtactactgtgctcagggggcgtgggttcctgtgacgttcggccaagggaccaaggtggaaatcaaacgg

SEQ ID NO: 499 - DNA, 324 bp, Homo sapiens
gacatccagatgacccagtctccatcctccctgtctgcatctgtaggagaccgtgtcaccatcacttgccgggcaagttctcctattgataatcagttactttggtaccagcagaaaccagggaaagcccctaagctcctgatcgcgggtgtttccgagttgcaaagtggggtcccatcacgtttcagtggcagtggatctgggacagatttcactctcaccatcagcagtctgcaacctgaagattttgctacgtactactgtgtgcaggttggtcgttggcctgctacgttcggccaagggaccaaggtggaaatcaaacgg

SEQ ID NO: 500 - protein, 108 aa, Homo sapiens
DIQMTQSPSSLSASVGDRVTITCRASQPIGIWLNWYQQKPGKAPKLLIYEISILQSGVPSRFSGSGSGTDFTLTISSLQPEDFATYYCQQDLTNPRTFGQGTKVEIKR

SEQ ID NO: 501 - protein, 108 aa, Homo sapiens
DIQMTQSPSSLSASVGDRVTITCRASQSIDLWLAWYQQKPGKAPRLLIYYSSQLQSGVPSRFSGSGSGTDFTLTISSLQPEDFATYYCQQLFITPLTFGQGTKVEIKR

SEQ ID NO: 502 - protein, 108 aa, Homo sapiens
DIQMTQSPSSLSASVGDRVTITCRASQDIWEYLAWYQQKPGKAPKLLIYGSSRLQSGVPSRFSGSGSGTDFTLTISSLQPEDFATYYCQQDYVYPPTFGQGTKVEIKR

SEQ ID NO: 503 - protein, 108 aa, Homo sapiens
DIQMTQSPSSLSASVGDRVTITCRASQEIHEFLNWYQQKPGKAPKLLIYEVSHLQSGVPSRFSGSGSGTDFTLTISSLQPEDFATYYCQQDFTDPFTFGQGTKVEIKR

SEQ ID NO: 504 - protein, 108 aa, Homo sapiens
DIQMTQSPSSLSASVGDRVTITCRASQGITDWLAWYQQKPGKAPKLLIYGSSWLQSGVPSRFSGSGSGTDFTLTISSLQPEDFATYYCQQLMSPPLTFGQGTKVEIKR

SEQ ID NO: 505 - protein, 108 aa, Homo sapiens
DIQMAQSPSSLSASVGDRVTITCRASQPIYDWLAWYQQKPGKAPKLLIYSASELQSGVPSRFSGSGSGTDFTLTISSLQPEDFATYYCQQLQTKPLTFGQGTKVEIKR

SEQ ID NO: 506 - protein, 108 aa, Homo sapiens
DIQMTQSPSSLSTSVGDRVTITCRASQDIGDWLAWYQQKPGKAPKLLIYYNSHLQSGVPSRFSGSGSGTDFTLTISSLQPEDSATYYCQQYADIPMTFGQGTKVEIKR

SEQ ID NO: 507 - protein, 108 aa, Homo sapiens
DIQMTQSPSSLSASVGDRVTITCRASQPIAYFLSWYQQKPGKAPKLLIYNDSTLQSGVPSRFSGSGSGTDFTLTISSLQPEDFATYYCQQDAFHPPTFGQGTKVEIKR

SEQ ID NO: 508 - protein, 108 aa, Homo sapiens
DIQMTQCPSSLSASVGDRVTITCRASQPIGDWLNWYQQKPGKAPKLLIYHISNLQSGVPSRFSGSGSGTDFTLTISSLQPEDFATYYCQQLLQYPLTFGQGTKVEIKR

SEQ ID NO: 509 - protein, 108 aa, Homo sapiens
DIQMTQSPSSLSASVGDRVTITCRASQNINFWLRWYQQKPGKAPTLLIYDASALQSGVPSRFSGSGSGTDFTLTISSLQPEDFATYYCQQDFNPPYTFGQGTKVEIKR

SEQ ID NO: 510 - protein, 108 aa, Homo sapiens
DIQMTQSPSSLSASVGDRVTITCRASQNINFWLRWYQQKPGKAPTLLIYDASRSQSGVPSRFSGSGSGTDFTLTISSLQPEDFATYYCQQDFNPPYTFGQGTKVEIKR

SEQ ID NO: 511 - protein, 108 aa, Homo sapiens
DIQMTQSPSSLSASVGDRVTITCRASQNINFWLRWYQQKPGKAPTLLIYDASALQSGVPSRFSGSGSGTDFTLTISSLQPEDFATYYCQQDLMPPYTFGQGTKVEIKR

SEQ ID NO: 512 - protein, 108 aa, Homo sapiens
DIQMTQSPSSLSASVGDRVTITCRASQNINFWLRWYQQKPGKAPTLLIYDASRSQSGVPSRFSGSGSGTDFTLTISSLQPEDFATYYCQQDLMPPYTFGQGTKVEIKR

SEQ ID NO: 513 - protein, 108 aa, Homo sapiens
DIQMTQSPSSLSASVGDRVTITCHASQNINFWLRWYQQKPGKAPTLLIYDASALQSGVPSRFSGSGSGTDFTLTISSLQPEDFATYYCQQDFNPPYTFGQGTKVEIKR

SEQ ID NO: 514 - protein, 108 aa, Homo sapiens
DIQMTQFPSSLSASVGDRVTITCTTDQNINFWLRWYQQKPGKAPTLLIYDASALQSGVPSRFSGSGSGTDFTLTISSLQPEDFATYYCQQDFNPPYTFGQGTKVEIKR

SEQ ID NO: 515 - protein, 108 aa, Homo sapiens
DIQMTQSPSSLSASVGDRVTITCAASQNTNFWLRWYQQKPGKAPTLLIYDASALQSGVPSRFSGSGSGTDFTLTISSLQPEDFATYYCQQDFNPPYTFGQGTKVEIKR

SEQ ID NO: 516 - protein, 108 aa, Homo sapiens
DIQMTQSPSSLSASVGDRVTITCNTTQNINFWLRWYQQKPGKAPTLLIYDASALQSGVPSRFSGSGSGTDFTLTISSLQPEDSATYYCQQDFNPPYTFGQGTKVEIKR

SEQ ID NO: 517 - protein, 108 aa, Homo sapiens
DIQMTQSPSSLSASVGDRVTITCRASQNINFWLRWYQQKPGKAPTLLIYDASAPNNGVPSRFSGSGSGTDFTLTISSLQPEDFATYYCQQDFNPPYTFGQGTKVEIKR

SEQ ID NO: 518 - protein, 108 aa, Homo sapiens
DIQMTQSPSSLSASVGDRVTITCRASQNINFWLRWYQQKPGKAPTLLIYDASQPQSGVPSRFSGSGSGTDFTLTISSLQPEDFATYYCQQDFNPPYTFGQGTKVEIKR

SEQ ID NO: 519 - protein, 108 aa, Homo sapiens
DIQMTQSPSSLSASVGDRVTITCRASQNINFWLRWYQQKPGKAPTLLIYDASALQSGVPSRFSGSGSGTDFTLTISSLQPEDFATYYCQQDFMNPFTFGQGTKVEING

SEQ ID NO: 520 - protein, 108 aa, Homo sapiens
DIQMTQSPSSLSASVGDRVTITCRASQNINFWLRWYQQKPGKAPTLLIYDASALQSGVPSRFSGSGSGTDFTLTISSLQPEDFATYYCQQDFHLPFTFGQGTKVEIKR

SEQ ID NO: 521 - protein, 108 aa, Homo sapiens
DIQMTQSPSSLSASVGDRVTITCRASQNINFWLRWYQQKPGKAPTLLIYDASALQSGVPSRFSGSGSGTDFTLTISSLQPEDFATYYCQQDFMFPLTFGQGTKVEIKR

SEQ ID NO: 522 - protein, 108 aa, Homo sapiens
DIQMTQSPSSLSASVGDRVTITCRASQNINFWLRWYQQKPGKAPTLLIYDASALQSGVPSRFSGSGSGTDFTLTISSLQPEDFATYYCQQDFSQPFTFGQGTKVEIKR

SEQ ID NO: 523 - protein, 108 aa, Homo sapiens
DIQMTQSPSSLSASVGDRVTITCRASQSINFWLRWYQQKPGKAPTLLIYDASRTQSGVPSRFSGSGSGTDFTLTISSLQPEDFATYYCQQDFNPPYTFGQGTKVEIKR

SEQ ID NO: 524 - protein, 108 aa, Homo sapiens
  VARIANT 106: Xaa = Any Amino Acid
DIQMTQSPSSLSASVGNRVTITCRASQNINFWLRWYQQKPGKAPTLLIYDASRSQSGVPSRFSGSGSGTDFTLTISSLQPEDFATYYCQQDFMNPFTFGQGTKVEXKR

SEQ ID NO: 525 - protein, 108 aa, Homo sapiens
DIQMTQSPSSLSASVGDRVTITCRASQNINFWLRWYQQKPGKAPTLLIYDASRSQSGVPSRFSGSGSGTDFTLTISSLQPEDFATYYCQQDFHLPFTFGQGTKVEIKR

SEQ ID NO: 526 - protein, 108 aa, Homo sapiens
DIQMTQSPSSLSASVGDRVTITCRASQNINFWLRWYQQKPGKAPTLLIYDASRSQSGVPSRFSGSGSGTDFTLTISSLQPEDFATYYCQQDFMFPLTFGQGTKVEIKR

SEQ ID NO: 527 - protein, 108 aa, Homo sapiens
DIQMTQSPSSLSASVGDRVTITCRASQNINFWLRWYQQKPGKAPTLLIYDASRSQSGVPSRFSGSGSGTDFTLTISSLQPEDFATYYCQQDFSQPFTFGQGTKVEIKR

SEQ ID NO: 528 - protein, 108 aa, Homo sapiens; identical to SEQ ID NO: 512

SEQ ID NO: 529 - protein, 108 aa, Homo sapiens
DIQMTQSPSSLSASVGDRVTITCRASQNINFWLRWYQQKPGKAPTLLIYDASRTQSGVPSRFSGSGSGTDFTLTISSLQPEDFATYYCQQDLMPPYTFGQGTKVEIKR

SEQ ID NO: 530 - protein, 108 aa, Homo sapiens
DIQMTQSPSSLSASVGDRVTITCRASQNINFWLRWYQQKPGKAPTLLIYDASAPNNGAPSRFSGSGSGTDFTLTISSLQPEDFATYYCQQDFHLPFTFGQGTKVEIKR

SEQ ID NO: 531 - protein, 108 aa, Homo sapiens
DIQMTQSPSSLSASVGDRVTITCRASQNINFWLRWYQQKPGKAPTLLIYDASAPNNGVPSRFSGSGSGTDFTLTISSLQPEDFATYYCQQDFMFPLTFGQGTKVEIKR

SEQ ID NO: 532 - protein, 108 aa, Homo sapiens
DIQMTQSPSSLSASVGDRVTITCRASQNINFWLRWYQQKPGKAPTLLIYDASAPNNGVPSRFSGSGSGTDFTLTISSLQPEDFATYYCQQDFSQPFTFGQGTKVEIKR

SEQ ID NO: 533 - protein, 108 aa, Homo sapiens
DIQMTQSPSSLSASVGDRVTITCRASQNINFWLRWYQQKPGKAPTLLIYDASAPNNGVPSRFSGSGSGTDFTLTISSLQPEDFATYYCQQDLMPPYTFGQGTKVEIKR

SEQ ID NO: 534 - protein, 108 aa, Homo sapiens
  VARIANT 106: Xaa = Any Amino Acid
DIQMTQSPSSLSASVGDRVTITCRASQNINFWLRWYQQKPGKAPTLLIYDASRTQSGVPSRFSGSGSGTDFTLTISSLQPEDFATYYCQQDFMNPFTFGQGTKVEXKR

SEQ ID NO: 535 - protein, 108 aa, Homo sapiens
DIQMTQSPSSLSASVGDRVTITCRASQNINFWLRWYQQKPGKAPTLLIYDASRTQSGVPSRFSGSGSGTDFTLTISSLQPEDFATYYCQQDFHLPFTFGQGTKVEIKR

SEQ ID NO: 536 - protein, 108 aa, Homo sapiens
DIQMTQSPSSLSASVGDRVTITCRASQNINFWLRWYQQKPGKAPTLLIYDASRTQSGVPSRFSGSGSGTDFTLTISSLQPEDFATYYCQQDFMFPLTFGQGTKVEIKR

SEQ ID NO: 537 - protein, 108 aa, Homo sapiens
DIQMTQSPSSLSASVGDRVTITCRASQNINFWLRWYQQKPGKAPTLLIYDASRTQSGVPSRFSGSGSGTDFTLTISSLQPEDFATYYCQQDFSQPFTFGQGAKVEIKR

SEQ ID NO: 538 - protein, 108 aa, Homo sapiens
  VARIANT 106: Xaa = Any Amino Acid
DIQMTQSPSSLSASVGDRVTITCRASQNINFWLRWYQQKPGKAPTLLIYDASAPNNGVPSRFSGSGSGTDFTLTISSLQPEDFATYYCQQDFMNPFTFGQGTKVEXKR

SEQ ID NO: 539 - protein, 108 aa, Homo sapiens
  VARIANT 106: Xaa = Any Amino Acid
DIQMTQSPSSLSASVGDRVTITCRASQNINFWLRWYQQKPGKAPTLLIYDASQPQSGVPSRFSGSGSGTDFTLTISSLQPEDFATYYCQQDFMNPFTFGQGTKVEXKR

SEQ ID NO: 540 - protein, 108 aa, Homo sapiens
DIQMTQSPSSLSASVGDRVTITCRASQNINFWLRWYQQKPGKAPTLLIYDASQPQSGDPSRFSGSGSGTDFTLTISSLQPEDFATYYCQQDFHLPFTFGQGTKVEIKR

SEQ ID NO: 541 - protein, 108 aa, Homo sapiens
DIQMTQSPSSLSASVGDRVTITCRASQNINFWLRWYQQKPGKAPTLLIYDASQPQSGVPSRFSGSGSGTDFTLTISSLQPEDFATYYCQQDFMFPLTFGQGTKVEIKR

SEQ ID NO: 542 - protein, 108 aa, Homo sapiens
DIQMTQSPSSLSASVGDRVTITCRASQNINFWLRWYQQKPGKAPTLLIYDASQPQSGVPSRFSGSGSGTDFTLTISSLQPEDFATYYCQQDFSQPFTFGQGTKVEIKR

SEQ ID NO: 543 - protein, 108 aa, Homo sapiens
DIQMTQSPSSLSASVGDRVTITCRASQNINFWLRWYQQKPGKAPTLLIYDASQPQSGVPSRFSGSGSGTDFTLTISSLQPEDFATYYCQQDLMPPYTFGQGTKVEIKR

SEQ ID NO: 544 - protein, 108 aa, Homo sapiens
  VARIANT 106: Xaa = Any Amino Acid
DIQMTQSPSSLSASVGDRVTITCRASQSINFWLRWYQQKPGKAPTLLIYDASRTQSGVPSRFSGSGSGTDFTLTISSLQPEDFATYYCQQDFMNPFTFGQGTKVEXKR

SEQ ID NO: 545 - protein, 108 aa, Homo sapiens
DIQMTQSPSSLSASVGDRVTITCRASQSINFWLRWYQQKPGKAPTLLIYDASRTQSGVPSRFSGSGSGTDFTLTISSLQPEDFATYYCQQDFHLPFTFGQGTKVEIKR

SEQ ID NO: 546 - protein, 108 aa, Homo sapiens
DIQMTQSPSSLSASVGDRVTITCRASQSINFWLRWYQQKPGKAPTLLIYDASRTQSGVPSRFSGSGSGTDFTLTISSLQPEDFATYYCQQDFMFPLTFGQGTKVEIKR

SEQ ID NO: 547 - protein, 108 aa, Homo sapiens
DIQMTQSPSSLSASVGDRVTITCRASQSINFWLRWYQQKPGKAPTLLIYDASRTQSGVPSRFSGSGSGTDFTLTISSLQPEDFATYYCQQDFSQPFTFGQGTKVEIKR

SEQ ID NO: 548 - protein, 108 aa, Homo sapiens
DIQMTQSPSSLSASVGDRVTITCRASQSINFWLRWYQQKPGKAPTLLIYDASRTQSGVPSRFSGSGSGTDFTLTISSLQPEDFATYYCQQDLMPPYTFGQGTKVEIKR

SEQ ID NO: 549 - protein, 108 aa, Homo sapiens
DIQMTQSPSSLSASVGDRVTITCHASQNINFWLRWYQQKPGKAPTLLIYDASRSQSGVPSRFSGSGSGTDFTLTISSLQPEDFATYYCQQDLMPPYTFGQGTKVEIKR

SEQ ID NO: 550 - protein, 108 aa, Homo sapiens
DIQMTQFPSSLSASVGDRVTITCTTDQNINFWLRWYQQKPGKAPTLLIYDASRSQSGVPSRFSGSGSGTDFTLTISSLQPEDFATYYCQQDLMPPYTFGQGTKVEIKR

SEQ ID NO: 551 - protein, 108 aa, Homo sapiens
DIQMTQSPSSLSASVGDRVTITCAASQNTNFWLRWYQQKPGKAPTLLIYDASRSQSGVPSRFSGSGSGTDFTLTISSLQPEDFATYYCQQDLMPPYTFGQGTKVEIKR

SEQ ID NO: 552 - protein, 108 aa, Homo sapiens
DIQMTQSPSSLSASVGDRVTITCNTTQNINFWLRWYQQKPGKAPKLLIYDASRSQSGVPSRFSGSGSGTDFTLTISSLQPEDFATYYCQQDLMPPYTFGQGTKVEIKR

SEQ ID NO: 553 - protein, 108 aa, Homo sapiens
DIQMTQSPSSLSASVGDRVTITCRASTSINFWLRWYQQKPGKAPTLLIYDASRSQSGVPSRFSGSGSGTDFTLTISSLQPEDFATYYCQQDLMPPYTFGQGTKVEIKR

SEQ ID NO: 554 - protein, 108 aa, Homo sapiens
DIQMTQSPSSLSASVGDRVTITCRASLPLNFWLRWYQQKPGKAPTLLIYDASRSQSGVPSRFSGSGSGTDFTLTISSLQPEDFATYYCQQDLMPPYTFGHGTKVEIKR

SEQ ID NO: 555 - protein, 108 aa, Homo sapiens
DIQMTQSPSSLSASVGDRVTITCFLSQNINFWLRWYQQKPGKAPTLLIYDASRSQSGVPSRFSGSGSGTDFTLTISSLQPEDFATYYCQQDLMPPYTFGQGTKVEIKR

SEQ ID NO: 556 - protein, 108 aa, Homo sapiens
DIQMTQSPSSLSASVGDRVTITCTTTQNINFWLRWYQQKPGKAPTLLIYDASRSQSGVPSRFSGSGSGTDFTLTISSLQPEDFATYYCQQDLMPPYTFGQGTKVEIKR

SEQ ID NO: 557 - protein, 108 aa, Homo sapiens
DIQMTQSPSSLSASVGDRVTITCRPNQNINFWLRWYQQKPGKAPTLLIYDASRSQSGVPSRFSGSGSGTDFTLTISSLQPEDFATYYCQQDLMPPYTFGQGTKVEIKR

SEQ ID NO: 558 - protein, 108 aa, Homo sapiens
DIQMTQSPSSLSASVGDRVTITCHTTQNINFWLRWYQQKPGKAPTLLIYDASRSQSGVPSRFSGSGSGTDFTLTISSLQPEDFATYYCQQDLMPPYTFGQGTKVEIKR

SEQ ID NO: 559 - protein, 108 aa, Homo sapiens
DIQMTQSPSSLSASVGDRVTITCVWGQNINFWLRWYQQKPGKAPTLLIYDASRSQSGVPSRFSGSGSGTDFTLTISSLQPEDFATYYCQQDLMPPYTFGQGTKVEIKR

SEQ ID NO: 560 - protein, 108 aa, Homo sapiens
DIQMTQSPSSLSASVGDRVTITCHSTQNINFWLRWYQQKPGKAPTLLIYDASRSQSGVPSRFSGSGSGTDFTLTISSLQPEDFATYYCQQDLMPPYTFGQGTKVEIKR

SEQ ID NO: 561 - protein, 108 aa, Homo sapiens
DIQMTQSPSSLSASVGDRVTITCRASTPTNFWLRWYRQKPGKAPTLLIYDASRSQSGVPSRFSGSGSGTDFTLTISSLQPEDFATYYCQQDLMPPYTFGQGTKVEIKR

SEQ ID NO: 562 - protein, 108 aa, Homo sapiens
DIQMTQSPSSLSASVGDRVTITCNINQNINFWLRWYQQKPGKAPTLLIYDASRSQSGVPSRFSGSGSGTDFTLTISSLQPEDFATYYCQQDLMPPYTFGQGTKVEIKR

SEQ ID NO: 563 - protein, 108 aa, Homo sapiens
DIQMTQSPSSLSASVGDRVTITCRPTQNINFWLRWYQQKPGKAPTLLIYDASRSQSGVPSRFSGSGSGTDFTLTISSLQPEDFATYYCQQDLMPPYTFGQGTKVEIKR

SEQ ID NO: 564 - protein, 108 aa, Homo sapiens
DIQMTQSPSSLSASVGDRVTITCRASLSINFWLRWYQQKPGKAPTLLIYDASRSQSGVPSRFSGSGSGTDFTLTISSLQPEDFATYYCQQDLMPPYTFGQGTKVEIKR

SEQ ID NO: 565 - protein, 108 aa, Homo sapiens
DIQMTQSPSSLSASVGDRVTITCRASSLLNFWLRWYQQKPGKAPTLLIYDASRSQSGVPSRFSGSGSGTDFTLTISSLQPEDFATYYCQQDLMPPYTFGQGTKVEIKR

SEQ ID NO: 566 - protein, 108 aa, Homo sapiens
  VARIANT 92, 93: Xaa = Any Amino Acid
DIQMTQSPSSLSASVGDRVTITCRASGELNFWLRWYQQKPGKAPTLLIYDASRSQSGVPSRFSGSGSGTDFTLTISSLQPEDFATYYCQQDXXVPFTFGQGTKVEIKR

SEQ ID NO: 567 - protein, 108 aa, Homo sapiens
DIQMTQSPSSLSASVGDRVTITCNTNQNINFWLRWYQQKPGKAPTLLIYDASRSQSGVPSRFSGSGSGTDFTLTISSLQPEDFATYYCQQDLMPPYTFGQGTKVEIKR

SEQ ID NO: 568 - protein, 108 aa, Homo sapiens
DIQMTQSPSSLSASVGDRVTITCRASKSVNFWLRWYQQKPGKAPTLLIYDASRSQSGVPSRFSGSGSGTDFTLTISSLQPEDFATYYCQQDLMPPYTFGQGTKVEIKR

SEQ ID NO: 569 - protein, 108 aa, Homo sapiens; identical to SEQ ID NO: 563

SEQ ID NO: 570 - protein, 108 aa, Homo sapiens
DIQMTQSPSSLSASVGDRVTITCNTKQNINFWLRWYQQKPGKAPTLLIDDASRSQSGVPSRFSGSGSGTDFTLTISSLQPEDFATYYCQQDLVPPYTFGQGTKVEIKR

SEQ ID NO: 571 - protein, 108 aa, Homo sapiens; identical to SEQ ID NO: 555

SEQ ID NO: 572 - protein, 108 aa, Homo sapiens
DIQMTQSPSSLSASVGDRVTITCRTGQNINFWLRWYQQKPGKAPTLLIDDASRSQSGVPSRFSGSGSGTDFTLTISSLQPEDFATYYCQQDLMPPYTFGQGTKVEIKR

SEQ ID NO: 573 - protein, 108 aa, Homo sapiens
DIQMTQSPSSLSASVGDRVTITCRASWSINFWLRWYQQKPGKAPTLLIYDASRSQSGVPSRFSGSGSGTDFTLTISSLQPEDFATYYCQQDLMPPYTFGQGTKVEIKR

SEQ ID NO: 574 - protein, 108 aa, Homo sapiens
DIQMTQSPSSLSASVGDRVTITCRASSPLNFWLRWYQQKPGKAPTLLIYDASRSQSGVPSRFSGSGSGTDFTLTINSLQPEDFATYYCQQDLMPPYTFGQGTKVEIKR

SEQ ID NO: 575 - protein, 108 aa, Homo sapiens
DIQMTQSPSSLSASVGDRVTITCRTSSPINFWLRWYQQKPGKAPTLLIYDASRSQSGVPSRFSGSGSGTDFTLTISSLQPEDFATYYCQQDLMPPYTFGQGTKVEIKR

SEQ ID NO: 576 - protein, 108 aa, Homo sapiens
DIQMTQSPSSLSASVGDRVTITCRASQWIGPYLNWYQQKPGKAPKPLIYMASYLPSGAPSRFSGSGSGTDFTLTISSLQPEDFATYYCQQDLYPPFTFGQGTKVEIKR

SEQ ID NO: 577 - protein, 108 aa, Homo sapiens
DIQMTQSPSSLSASVGDRVTITCRASQKIGPYLQWYQQKPGKAPKLLIYSASVLQSGVPSRFSGSGSGTVFTLTISSLQPEDFATYYCQQGINPPRTFGQGTKVEIKR

SEQ ID NO: 578 - protein, 108 aa, Homo sapiens
DIQMTQSPSSLSASVGDRVTITCRASQWIGPYLNWYQQKPGKAPKPLIYMGWHYPSGVPSRFSGSGSGTDFTLTISSLQPEDFATYYCQQDLYPPFTFGQGTKVEIKR

SEQ ID NO: 579 - protein, 108 aa, Homo sapiens
DIQMTQSPSSLSASVGDRVTITCRASQWIGPYLNWYQQKPGKAPKPLIYMGSHNVEGVPSRFSGSGSGTDFTLTISSLQPEDFATYYCQQDLYPPFTFGQGTKVEIKR

SEQ ID NO: 580 - protein, 108 aa, Homo sapiens
DIQMTQSPSSLSASVGDRVTITCRASQWIGPYLNWYQQKPGKAPKPLIYSSWYLPSGVPSRFSGSGSGTDFTLTISSLQPEDFATYYCQQDLYPPFTFGQGTKVEIKR

SEQ ID NO: 581 - protein, 108 aa, Homo sapiens
DIQMTQSPSSLSASVGDRVTITCRASQWIGPYLNWYQQKPGKAPKPLIYMGSYKGRGVPSRFSGSGSGTDFTLTISSLQPEDFATYYCQQDLYPPFTFGQGTKVEIKR

SEQ ID NO: 582 - protein, 108 aa, Homo sapiens
DIQMTQSPSSLSASVGDRVTITCRAGQNINFWLRWYQQKPGKAPALLIYDASESQSGVPSRFSGSGSGTDFTLTISSLQPEDFATYYCQQDLMPPYTFGQGTKVEIKR

SEQ ID NO: 583 - protein, 108 aa, Homo sapiens
DIQMTQSPSSLSASVGDRVTITCRASQNSNFWLRWYQQKPGKAPTLLIYDASRSGSGVPSRFSGSGSGTDFTLTISSLQPEDFATYYCQQDLMPPYTFGQGTKVEIKR

SEQ ID NO: 584 - protein, 108 aa, Homo sapiens
DIQMTQSPSSLSASVGDRVTITCRASQNINFWLRWYQQKPGKAPTLLIYDASRSQPGVPSRFSGSGSGTDFTLTISSLQPEDFATYYCQQDLMPPYTFGQGTKVEIKR

SEQ ID NO: 585 - protein, 108 aa, Homo sapiens
DIQMTQSPSSLSASVGDRVTITCRASQNINFWLRWYQQKPGKAPTLLIYDASRSQGGVPSRFSGSGSGTDFTLTISSLQPEDFATYYCQQDLMPPYTFGQGTKVEIKR

SEQ ID NO: 586 - protein, 108 aa, Homo sapiens
DIQMTQSPSSLSASVGDRVTITCRASQNINFWLRWYQQKPGKAPTLLIYDASRSQSGVPSRFSGSGSGTDFTLTISSLQPEDFATYYCQQDLRPPYTFGQGTKVEIKR

SEQ ID NO: 587 - protein, 108 aa, Homo sapiens
DIQMTQSPSSLSASVGDRVTITCRASQNINFWLRWYQQKPGKAPTLLIYDASRSQSGVPSRFSGSGSGTDFTLTISSLQPEDFATYYCQQDLWPPYTFGQGTKVEIKR

SEQ ID NO: 588 - protein, 108 aa, Homo sapiens
DIQMTQSPSSLSASVGDRVTITCRASQNINFWLRWYQQKPGKAPTLLIYDASRSQSGVPSRFSGSGSGTDFTLTISSLQPEDFATYYCQQDLEPPYTFGQGTKVEIKR

SEQ ID NO: 589 - protein, 108 aa, Homo sapiens; identical to SEQ ID NO: 586

SEQ ID NO: 590 - protein, 108 aa, Homo sapiens
DIQMTQSPSSLSASVGDRVTITCRASQNINFWLRWYQQKPGKAPTLLIYDASRSQSGVPSRFSGSGSGTDFTLTISSLQPEDFATYYCQQDLTPPYTFGQGTKVEIKR

SEQ ID NO: 591 - protein, 108 aa, Homo sapiens
DIQMTQSPSSLSASVGDRVTITCRASQNINFWLRWYQQKPGKAPTLLIYDASRSQSGVPSRFSGSGSGTDFTLTISSLQPEDFATYYCQQDLGPPYTFGQGTKVEIKR

SEQ ID NO: 592 - protein, 108 aa, Homo sapiens
DIQMTQSPSSLSASVGDRVTITCRASQNINFWLRWYQQKPGKAPTLLIYDASRSQSGVPSRFSGSGSGTDFTLTISSLQPEDFATYYCQQDLCPPYTFGQGTKVEIKR

SEQ ID NO: 593 - protein, 108 aa, Homo sapiens
DIQMTQSPSSLSASVGDRVTITCRASQNINFWLRWYQQKPGKAPTLLIYDASRSQSGVPSRFSGSGSGTDFTLTISSLQPEDFATYYCQQDLMPPSTFGQGTKVEIKR

SEQ ID NO: 594 - protein, 108 aa, Homo sapiens
DIQMTQSPSSLSASVGDRVTITCRASQMIEWHLDWYQQKPGKAPRLLIYDISKLQSGVPSRFSGSGSGTDFTLTISSLQPEDFATYYCQQYEIPPVTFGQGTKVEIKR

SEQ ID NO: 595 - protein, 108 aa, Homo sapiens
DIQMTQSPSSLSASVGDRVTITCRTSQDINSWLNWYQQKPGKAPKLLIYLASSLQSGVPPRFSGSGSGTDFTLTISSLQPEDFATYYCQQYMLEPYTFGQGTKVEIKR

SEQ ID NO: 596 - protein, 108 aa, Homo sapiens
DIQMTQSPSSLSASVGDRVTITCRASQDIGEYLAWYQQKPGKAPKLLIYYISRLQSGVPSRFSGSGSGTDFTLTISSLQPEDFATYYCQQLMDFPFTFGQGTKVEIKR

SEQ ID NO: 597 - protein, 108 aa, Homo sapiens
DIQMTQSPSSLSASVGDRVTITCRASQDIGDWLGWYQQKPGKAPKLLIYLGSMLQSGVPSRFSGSGSGTDFTLTISSLQPEDFATYYCQQFNVMPFTFGQGTKVEIKR

SEQ ID NO: 598 - protein, 108 aa, Homo sapiens
DIQMTQSPSSLSASVGDRVTITCRASRRIVDMLDWYQQKPGKAPKLLIAGGSVLQSGVPSRFSGSGSGTDFTLTISSLQPEDFATYYCGQYAAYPPTFGQGTKVEIKR

SEQ ID NO: 599 - protein, 108 aa, Homo sapiens
DIQMTQSPSSLSASVGDRVTITCRASRYIADGLDWYQQKPGKAPMLLIVGGSGLQSGVPSRFSGSGSGTDFTLTISSLQPEDFATYYCAQWWEYPATFGQGTKVEIKR

SEQ ID NO: 600 - protein, 108 aa, Homo sapiens
DIQMTQSPSSLSASVGDRVTITCRASTNIWTHLDWYQQKPGKAPKLLIAGVSRLQSGVPSRFSGSGSGTDFTLTISSLQPEDFATYYCAQFAGYPVTFGQGTKVEIKR

SEQ ID NO: 601 - protein, 108 aa, Homo sapiens
DIQMTQSPSSLSASVGDRVTITCRASRNIDIMLDWYQQKPGKAPKLLIGSGSGLQSGVPSRFSGSGSGTDFTLTISSLQPEDFATYYCGQYAAYPPTFGQGTKVEIKR

SEQ ID NO: 602 - protein, 108 aa, Homo sapiens
DIQMTQSPSSLSASVGDRVTITCRASLDIGDWLHWYQQKPGKAPKLLIGWGSGLQSGVPSRFSGSGSGTDFTLTISSLQPEDFATYYCLQEGLGPPTFGQGTKVEIKR

SEQ ID NO: 603 - protein, 108 aa, Homo sapiens
DIQMTQSPSSLSASVGDRVTITCRASLDIGDWLHWYQQKPGKAPKLLIGWGSGLQSGVPSRFSGSGSGTDFTLTISSLQPEDFATYYCLQEGWGPPTFGQGTKVEIKR

SEQ ID NO: 604 - protein, 108 aa, Homo sapiens
DIQMTQSPSSLSASVGDRVTITCRASLDIGDWLHWYQQKPGKAPKLLIAWASLLPSGVPSRFSGSGSGTDFTLTISSLQPEDFATYYCLQEGWGPPTFGQGTKVEIKR

SEQ ID NO: 605 - protein, 108 aa, Homo sapiens
DIQMTQSPSSLSASVGDRVTITCRASLDIGDWLHWYQQKPGKAPKLLIAWASTLDSGVPSRFSGSGSGTDFTLTISSLQPEDFATYYCLQEGWGPPTFGQGTKVEIKR

SEQ ID NO: 606 - protein, 108 aa, Homo sapiens
DIQMTQSPSSLSASVGDRVTITCRASLDIGDWLHWYQQKPGKAPKLLIPWASGLWSGVPSRFSGSGSGTDFTLTISSLQPEDFATYYCLQEGWGPPTFGQGTKVEIKR

SEQ ID NO: 607 - protein, 108 aa, Homo sapiens
DIQMTQSPSSLSASVGDRVTITCRASLDIGDWLHWYQQKPGEAPKLLISWASTLPSGVPSRFSGSGSGTDFTLTISSLQPEDFATYYCLQEGWGPPTFGQGTKVEIKR

SEQ ID NO: 608 - protein, 108 aa, Homo sapiens
DIQMTQSPSSLSASVGDRVTITCRASRNIGDWLHWYQQKPGKAPKLLIAWASTLDSGVPSRFSGSGSGTDFTLTISSLQPEDFATYYCLQEGWGPPTFGQGTKVEIKR

SEQ ID NO: 609 - protein, 108 aa, Homo sapiens
DIQMTQSPSSLSASVGDRVTITCRASLDIGDWLHWYQQKPGKAPKLLISWASTLDSGVPSRFSGSGSGTDFTLTISSLQPEDFATYYCLQEGWGPPTFGQGTKVEIKR

SEQ ID NO: 610 - protein, 108 aa, Homo sapiens
DIQMTQSPSSLSASVGDRVTITCRASLDIGDWLHWYQQKPGKAPKLLISWASTLPSGVPSRFSGSGSGTDFTLTISSLQPEDFATYYCLQEGWGPPTFGQGTKVEIKR

SEQ ID NO: 611 - protein, 108 aa, Homo sapiens
DIQMTQSPSSLSASVGDRVTITCRASRSIGDWLHWYQQKPGKAPKLLIAWASTLDSGVPSRFSGSGSGTDFTLTISSLQPEDFATYYCLQEGWGPPTFGQGTKVEIKR

SEQ ID NO: 612 - protein, 108 aa, Homo sapiens
DIQMTQSPSSLSASVGDRVTITCRASRPIADWLHWYQQKPGKAPKLLIAWASTLDSGVPSRFSGSGSGTDFTLTISSLQPEDFATYYCLQEGWGPPTFGQGTKVEIKR

SEQ ID NO: 613 - protein, 108 aa, Homo sapiens; identical to SEQ ID NO: 610

SEQ ID NO: 614 - protein, 108 aa, Homo sapiens
DIQMTQSPSSLSASVGDRVTITCRASRAISDWLHWYQQKPGKAPKLLIAWASTLDSGVPSRFSGSGSGTDFTLTISSLQPEDFATYYCLQEGWGPPTFGQGTKVEIKR

SEQ ID NO: 615 - protein, 108 aa, Homo sapiens
DIQMTQSPSSLSASVGDRVTITCRASAPISDWLHWYQQKPGKAPKLLIAWASTLDSGVPSRFSGSGSGTDFTLTISSLQPEDFATYYCLQEGWGPPTFGQGTKVEIKR

SEQ ID NO: 616 - protein, 108 aa, Homo sapiens
DIQMTQSPSSLSASVGDRVTITCRASHPIGDWLHWYQQKPGKAPKLLIAWASTLDSGVPSRFSGSGSGTDFTLTISSLQPEDFATYYCLQEGWGPPTFGQGTKVEIKR

SEQ ID NO: 617 - protein, 108 aa, Homo sapiens
DIQMTQSPSSLSASVGDRVTITCRASRPISDWLHWYQQKPGKAPKLLIAWASTLDSGVPSRFSGSGSGTDFTLTISSLQPEDFATYYCLQEGWGPPTFGQGTKVEIKR

SEQ ID NO: 618 - protein, 108 aa, Homo sapiens
  VARIANT 36: Xaa = Any Amino Acid
DIQMTQSPSSLSASVGDRVTITCRASLDIGDWLHWXQQKPGKAPQLLIAWASTSDSGVPSRFSGSGSGTDFTLTISSLQPEDFATYYCLQEGWGPPTFGQGTKVEIKR

SEQ ID NO: 619 - protein, 108 aa, Homo sapiens
  VARIANT 36: Xaa = Any Amino Acid
DIQMTQSPSSLSASVGDRVTITCRASLDIRDWLHWXQQKPGKAPKLLIAWASTLDSGVPSRFSGSGSGTDFTLTISSLQPEDFATYYCLQEGWGPPTFGQGTKVEIKR

SEQ ID NO: 620 - protein, 108 aa, Homo sapiens
DIQMTQSPSSLSASVGDRVTITCRASRPISDWLHWYQQKPGKAPKLLIAWASTLDSGVPSRFSGRGSGTDFTLTISSLQPEDFATYYCLQEWWGPPTFGQGTKVEIKR

SEQ ID NO: 621 - protein, 108 aa, Homo sapiens
DIQMTQSPSSLSASVGDRVTITCRASRPISDWLHWYQQKPGKAPKLLIAWASTLDSGVPSRFSGSGSGTDFTLTISSLQPEDFATYYCLQSGWGPPTFGQGTKVEIKR

SEQ ID NO: 622 - protein, 108 aa, Homo sapiens
DIQMTQSPSSLSASVGDRVTITCRASRPISDWLHWYQQKPGKAPRLLIYTASRSQSGVPSRFSGSGSGTDFTLTISSLQPEDFATYYCLQEGWKPPTFGQGTKVEIKR

SEQ ID NO: 623 - protein, 108 aa, Homo sapiens
DIQMTQSPSSLSASVGDRVTITCRASRGISDWLHWYQQKPGKAPKLLIAWASTLDSGVPSRFSGSGSGTDFTLTISSLQPEDFATYYCLQEGWGPPTFGQGTKVEIKR

SEQ ID NO: 624 - protein, 108 aa, Homo sapiens
DIQMTQSPSSLSASVGDRVTITCRASRNISDWLHWYQQKPGKAPKLLIAWASTLDSGVPSRFSGSGSGTDFTLTISSLQPEDFATYYCLQEGWGPPTFGQGTKVEIKR

SEQ ID NO: 625 - protein, 108 aa, Homo sapiens
DIQMTQSPSSLSASVGDRVTITCRASRNISDWLHWYQQKPGKAPRLLIAWASTLDSGVPSRFSGSGSGTDFTLTISSLQPEDFATYYCLQEGWGPPTFGQGTKVEIKR

SEQ ID NO: 626 - protein, 108 aa, Homo sapiens
DIQMTQSPSSLSASVGDRVTITCRASRKISDWLHWYQQKPGKAPKLLIAWASTLDSGVPSRFSGSGSGTDFTLTISSLQPEDFATYYCLQEGWGPPTFGQGTKVEIKR

SEQ ID NO: 627 - protein, 108 aa, Homo sapiens
DIQMTQSPSSLSASVGDRVTITCRASEPISDWLHWYQQKPGKAPKLLIAWASTLDSGVPSRFSGSGSGTDFTLTISSLQPEDFATYYCLQEGWGPPTFGQGTKVETKR

SEQ ID NO: 628 - protein, 108 aa, Homo sapiens
DIQMTQSPSSLSASVGDRVTITCRASRPISDWLHWYQQKPGKAPKLLIAWASVLDSGVPSRFSGSGSGTDFTLTISSLQPEDFATYYCLQEGWGPPTFGQGTKVEIKR

SEQ ID NO: 629 - protein, 108 aa, Homo sapiens
DIQMTQSPSSLSASVGDRVTITCRASRPISDWLHWYQQKPGKAPKLLIAWAPTLDSGVPSRFRGSGSGTDFTLTISSLQPEDFATYYCLQEGWGPPTFGQGTKVEIKR

SEQ ID NO: 630 - protein, 108 aa, Homo sapiens
DIQMTQSPSSLSASVGDRVTITCRASRPISDWLHWYQQKPGKAPKLLIAWASTLVSGVPSRFSGSGSGTDFTLTISSLQPEDFATYYCLQEGWGPPTFGQGTKVEIKR

SEQ ID NO: 631 - protein, 108 aa, Homo sapiens
DIQMTQSPSSLSASVGDRVTITCRASRPISDWLHWYQQKPGKAPKLLIAWASTLLSGVPSRFSGSGSGTDFTLTISSLQPEDFATYYCLQEGWGPPTFGQGTKVEIKR

SEQ ID NO: 632 - protein, 108 aa, Homo sapiens
DIQMTQSPSSLSASVGDRVTIACRASRPISDWLHWYQQKPGKAPKLLIAWASTLQSGVPSRFSGSGSGTDFTLTISSLHPEDFATYYCLQEGWGPPTFGQGTKVEIKR

SEQ ID NO: 633 - protein, 108 aa, Homo sapiens
  UNSURE 36: Xaa = unknown
DIQMTQSPSSLSASVGDRVTITCRASRPISDWLHWXQQKPGKAPKLLIAWASTLLNGVPSRFSGSGSGTDFTLTISSLQPEDFATYYCLQEGWGPPTFGQGTKVEIKR

SEQ ID NO: 634 - protein, 108 aa, Homo sapiens; identical to SEQ ID NO: 630

SEQ ID NO: 635 - protein, 108 aa, Homo sapiens
DIQMTQSPSSLSASVGDRVTITCRASRPISDWLHWYQQKPGKAPKLLIAWASTSDSGVPSRFSGSGSGTDFTLTISSLQPEDFATYYCLQEGWGPPTFGQGTKVEIKR

SEQ ID NO: 636 - protein, 108 aa, Homo sapiens
DIQMTQSPSSLSASVGDRVTITCRASRPISDWLHWYQQKPGKAPKLLIAWASTLDLGVPSRFSGSGSGTDFTLTISSLQPEDFATYYCLQEGWGPPTFGQGTKVEIKR

SEQ ID NO: 637 - protein, 108 aa, Homo sapiens
DIQMTQSPSSLSASVGDRVTITCRASRPISDWLHWYQQKPGKAPKLLIAWASTLDQGVPSRFSGSGSGTDFTLTISSLQPEDFATYYCLQEGWGPPTFGQGTKVEIKR

SEQ ID NO: 638 - protein, 108 aa, Homo sapiens
DIQMTQSPSSLSASVGDRVTITCRASRPISDWLHWYQQKPGKAPKLLIAWASTLDDGVPSRFSGSGSGTDFTLTISSLQPEDFATYYCLQEGWGPPTFGQGTKVEIKR

SEQ ID NO: 639 - protein, 108 aa, Homo sapiens
DIQMTQSPSSLSASVGDRVTITCRASRPISDWLHWYQQKPGKAPKLLIAWASTLDHGVPSRFSGSGSGTDFTLTISSLQPEDFATYYCLQEGWGPPTFGQGTKVEIKR

SEQ ID NO: 640 - protein, 108 aa, Homo sapiens
DIQMTQSPSSLSASVGDRVTITCRASRPISDWLHWYQQKPGKAPKLLIAWASTLDSGVPSRFSGSGSGTDFTLTISSLQPEDFAAYYCLQEGWGPPTFGQGTKVEIKR

SEQ ID NO: 641 - protein, 108 aa, Homo sapiens
DIQMTQSPSSLPASVGDRVTITCRASLDIGDWLHWYQQKPGKAPKLLIAWASTLDSGVPSRFSGSGSGTDFTLTISSLQPEDFATYYCLQEGWGPPTFGQGTKVEIKR

SEQ ID NO: 642 - protein, 108 aa, Homo sapiens
DIQMTQSPSSLSASVGDRVTITCRASLDIGDWLHWYQQKPGKDPKLLIAWASTLDSGVPSRFSGSGSGTDFTLTISSLQPEDFATYYCLQEGWGPPTFGQGTKVEIKR

SEQ ID NO: 643 - protein, 108 aa, Homo sapiens
DIQMTQSPSSLSASVGDRVTITCRASLDIGDWLHWYQQKPGKAPKLLIAWASTLDSGVPSRFSGSGSGTDFTLTISSLQPEDFATYYCLQSGWGPPTFGQGTKVEIKR

SEQ ID NO: 644 - protein, 108 aa, Homo sapiens
DIQMTQSPSSLPASVGDRVTITCRASRPISDWLHWYQQKPGKAPKLLIAWASTLDSGVPSRFSGSGSGTDFTLTISSLQPEDFATYYCLQEGWGPPTFGQGTKVEIKR

SEQ ID NO: 645 - protein, 108 aa, Homo sapiens
DIQMTQSPSSLSASVGDRVTITCRASRRIGNDLVWYQQKPGKAPKLLIGGGSRLQSGVPSRFSGSGSGTDFTLTISSLQPEDFATYYCVQLYRLPVTFGQGTKVEIKR

SEQ ID NO: 646 - protein, 108 aa, Homo sapiens
DIQMTQSPSSLSASVGDRVTITCRASTNIWGGLDWYQQKPGKAPKLLIGAVSELQSGVPSRFSGSGSGTDFTLTISSLQPEDFATYYCGQWAVYPPTFGQGTKVEIKR

SEQ ID NO: 647 - protein, 108 aa, Homo sapiens
DIQMTQSPSSLSASVGDRVTITCRASRQIWNMLDWYQQKPGKAPKLLIGGGSRLQSGVPSRFSGSGSGTDFTLTISSLQPEDFATYYCGQYAGYPATFGQGTKVEIKR

SEQ ID NO: 648 - protein, 108 aa, Homo sapiens
DIQMTQSPSSLSASVGDRVTITCRASTNIHDGLDWYQQKPGKAPKLLIFASSELQSGVPSRFSGSGSGTDFTLTISSLQPEDFATYYCGQWFSYPATFGQGTKVEIKR

SEQ ID NO: 649 - protein, 108 aa, Homo sapiens
DIQMTQSPSSLSASVGDRVTITCRASQVIDDDLSWYQQKPGKAPKLLIGVGSWLQSGVPSRFSGSGSGTDFTLTISSLQPEDFATYYCAQGAWVPVTFGQGTKVEIKR

SEQ ID NO: 650 - protein, 108 aa, Homo sapiens
DIQMTQSPSSLSASVGDRVTITCRASSPIDNQLLWYQQKPGKAPKLLIAGVSELQSGVPSRFSGSGSGTDFTLTISSLQPEDFATYYCVQVGRWPATFGQGTKVEIKR

SEQ ID NO: 651 - DNA, 354 bp, Homo sapiens
ggggtgcagctgttggagtctgggggaggcttggtacagcctggggggtccctgcgtctctcctgtgcagcctccggattcacctttgcttggtatgatatggggtgggcccgccaggctccagggaagggtctagagtgggtctcaagtattgatgattctggtacgcagacatactacgcagactccgtgaagggccggttcaccatctcccgcgacaattccaagaacacgctgtatctgcaaatgaacagcctgcgtgccgaggacaccgcggtatattactgtgcgacagcggagagggatgatacttttgactactggggtcagggaaccctggtcaccgtctcgagc

SEQ ID NO: 652 - DNA, 354 bp, Homo sapiens
ggggtgcagctgttggagtctgggggaggcttggtacagcctggggggtccctgcgtctctcctgtgcagcctccggattcacctttgcttggtatgatatggggtgggcccgccaggctccagggaagggtctagagtgggtctcaagtattgatgattctggtacgcagacatactacgcagactccgtgaagggccggttcaccatctcccgcgacaattccaagaagacgctgtatctgcaaatgaacagcctgcgtgccgaggacaccgcggtatattactgtgcgacagcggagagggatgatacttttgactactggggtcagggaaccctggtcaccgtctcgagc

SEQ ID NO: 653 - DNA, 354 bp, Homo sapiens
ggggtgcagctgttggagtctgggggaggcttggtacagcctggggggtccctgcgtctctcctgtgcagcctccggattcacctttgcttggtatgatatgggatgggcccgccaggctccagagaagggtctagagtgggtctcaagtattaatgattatggtacgcagacatactacgcagactccgtgaagggccggttcaccatctcccgcgacaattccaataacacgctgtatctgcaaatgaacagcctgcgtgccgaggacaccgcggtatattactgtgcgacagcggagagggatgatacttttgactactggggtcagggaaccctggtcaccgtctcgagc

SEQ ID NO: 654 - DNA, 354 bp, Homo sapiens
ggggtgcagctgttggagtctgggggaggcttggtacagcctggggggtccctgcgtctctcctgtgcagcctccggattcacctttgcttggtatgatatggggtgggcccgccaggctccagggaagggtctagagtgggtctcaagtatagatgattctggtacgcagacatactacgcagactccgtgaagggccggttcaccatctcccgcgacaattccaagaacacgctgtatctgcaaatgaacagcctgcgtgccgaggacaccgcggtatattactgtgcgacagcggagagggatgatacttatgactactggggtcagggaaccctggtcaccgtctcgagc

SEQ ID NO: 655 - DNA, 354 bp, Homo sapiens
ggggtgcagctgttggagtctgggggaggcttggtacagcctggggggtccctgcgtctctcctgtgcagcctccggattcacctttgcttggtatgatatggggtgggcccgccaggctccagggaagggtctagagtgggtctcaagtattgatgattctggtacgcatacgtactacgcagactccgtgaatggccggttcaccatctcccgcgacaattccaagaacacgctgtatctgcaaatgaacagcctgcgtgccgaggacaccgcggtatattactgtgcgacagcggagagggatgatacttttgactactggggtcagggaaccctggtcaccgttctgcga

SEQ ID NO: 656 - DNA, 354 bp, Homo sapiens
ggggtgcagctgttggagtctgggggaggcttggtacagcctggggggtccctgcgtctatcctgtgcagcctccggattcacctttgcttggtatgatatggggtgggcccgccaggctccagggaagggtctagagtgggtctcaagtattgatgattctggtacgcagacatactacgcagactccgtgatgggccggttcaccatctcccgcgacaattccaagaacacgctgtatctgcaaatgaacagcctgcgtgccgaggacaccgcggtatattactgtgcgacagcggagagggatgatacttttgactactggggtcagggaaccctggtcaccgtctcgagc

SEQ ID NO: 657 - DNA, 354 bp, Homo sapiens
ggggtgaagctgttggagtctgggggaggcttggtacagcctggggggtccctgcgtctctcctgtgcagcctccggattcacctttgcttggtatgatatggggtgggcccgccaggctccagggaagggtctagagtgggtctcaagtattgatgattctggtacgcagacatactacgcagactccgtgaagggccggttcaccatctcccgcgacaattccaagaacacgctgtatctgcaaatgaacagcctgcgtgccgaggacaccgcggtatattactgtgcgacagcggagagggatgatacttttgactactggggtcagggaaccctggtcaccgtctcgagc

SEQ ID NO: 658 - DNA, 354 bp, Homo sapiens
ggggcgcagctgttggagtctgggggaggcttggtacagcctggggggtccctgcgtctctcctgtgcagcctccggattcacctttgcttggtatgatatggggtgggcccgccaggctccagggaagggtctagagtgggtctcaagtattgatgattctggtacgcagacatactacgctgactccgtgaagggccggttcaccatctcacgcgacaattccaagaacacgctgtatctgcaaatgaacagcctgcgtgccgaggacaccgcggtatattactgtgcgacagcggagagggatgatacttttgactactggggtcagggaaccctggtcaccgtctcgagc

SEQ ID NO: 659 - DNA, 354 bp, Homo sapiens
ggggtgcagctgttggagtctgggggaggcttggtacagcctggggggtccctgcgtctctcctgtgcagcctccggattcacctttgcttggtatgatatggggtgggcccgccaggctccagggaagggtctagagtgggtctcaaagattaaggattatggtctggctacatactacgcagactccgtgaagggccgtttcaccatctcccgcgacaattccaagaacacgctgtatctgcaaatgaacagcctgcgtgccgaggacaccgcggtatattactgtgcgacagcggagagggatgatacttttgactactggggtcagggaaccctggtcaccgtcgcgagc

SEQ ID NO: 660 - DNA, 354 bp, Homo sapiens
ggggtgcagctgttggagtctgggggaggcttggtacagcctggggggtccctgcgtctctcctgtgcagcctccggattcacctttgcttggtatgatatggggtgggcccgccaggctccagggaagggtctagagtgggtctcaacgattgcgtggcttggtgatggtacatactacgcagactccgtgaagggccggttcaccatctcccgcgacaattccaagaacacgctgtatctgcaaatgaacagcctgcgtgccgaggacaccgcggtatattactgtgcgacagcggagagggatgatacttttgactactggggtcagggaaccctggtcaccgtctcgagc

SEQ ID NO: 661 - DNA, 354 bp, Homo sapiens
ggggtgcagctgttggagtctgggggaggcttggtacagcctggggggtccctgcgtctctcctgtgcagcctccggattcacctttgcttggtatgatatggggtgggtccgccaggctccagggaagggtctagagtgggtctcaactattgattgggttggtttggctacatactacgcagactccgtgaagggccggttcaccatctcccgcgacaattccaagaacacgctgtatctgcaaatgaacagcctgcgtgccgaggacaccgcggtatattactgtgcgacagcggagagggatgatacttttgactactggggtcagggaaccctggtcaccgtctcgagc

SEQ ID NO: 662 - DNA, 354 bp, Homo sapiens
ggggtgcagctgttggagtctgggggaggcttggtacagcctggggggtccctgcgtctctcctgtgcagcctccggattcacctttgcttggtatgatatggggtgggcccgccaggctccagggaagggtctagagtgggtctcagttattccgtgggttggtcctcttacatactacgcagactccgtgaagggccggttcaccatctcccgcgacaattccaagaacacgctgtatctgcaaatgaacagcctgcgtgccgaggacaccgcggtatattactgtgcgacagcggagagggatgatacttttgactactggggtcagggaaccctggtcaccgtctcgagc

SEQ ID NO: 663 - DNA, 354 bp, Homo sapiens
ggggtgcagctgttggagtctgggggaggcttggtacagcctggggggtccctgcgtctctcctgtgcagcctccggattcacctttgcttggtatgatatggggtgggcccgccaggctccagggaagggtctagagtgggtctcaactattactgattggggtttgtctacatactacgcagactccgtgaagggccggttcaccatctcccgcgacaattccaagaacacgctgtatctgcaaatgaacagcctgcgtgccgaggacaccgcggtatattactgtgcgacagcggagagggatgatacttttgactactggggtcagggaaccctggtcaccgtctcgagc

SEQ ID NO: 664 - DNA, 354 bp, Homo sapiens
ggggtgcagctgttggagtctgggggaggcttggtacagcctggggggtccctgcgtctctcctgtgcagcctccggattcacctttgcttggtatgatatggggtgggtccgccaggctccagggaagggtctagagtgggtctcagagattaattggtatggtgttgtgacatactacgcagactccgtgaagggccggttcaccatctcccgcgacaattccaagaacacgctgtatctgcaaatgaacagcctgcgtgccgaggacaccgcggtatattactgtgcgacagcggagagggatgatacttttgactactggggtcagggaaccctggtcaccgtctcgagc

SEQ ID NO: 665 - DNA, 354 bp, Homo sapiens
ggggtgcagctgttggagtctgggggaggcttggtacagcctggggggtccctgcgtctctcctgtgcagcctccggattcacctttgcttggtatgatatggggtgggcccgccaggctccagggaagggtctggagtgggtctcaattattactgattcgggttgggggacatactacgcagactccgtgaagggccggttcaccatctcccgcgacaattccaagaacacgctgtatctgcaaatgaacagcctgcgtgccgaggacaccgcggtatattactgtgcgacagcggagagggatgatacttttgactactggggtcagggaaccctggtcaccgtctcgagc

SEQ ID NO: 666 - DNA, 354 bp, Homo sapiens
ggggtgcagctgttggagtctgggggaggcttggtacagcctggggggtccctgcgtctctcctgtgcagcctccggattcacctttgcttggtatgatatggggtgggcccgccaggctccagggaagggtctagagtgggtctcacggattaaggattggggttgggctacatactacgcagactccgtgaagggccggttcaccatctcccgcgacaattccaagaacacgctgtatctgcaaatgaacagcctgcgtgccgaggacaccgcggtatattactgtgcgacagcggagagggatgatacttttgactactggggtcagggaaccctggtcaccgttctcgag

SEQ ID NO: 667 - DNA, 354 bp, Homo sapiens
ggggtgcagctgttggagtctgggggaggcttggtacagcctggggggtccctgcgtctctcctgtgcagcctccggattcacctttgcttggtatgatatggggtgggcccgccaggctccagggaagggtctagagtgggtctcattgattagtgatcttggttatgctacatactacgcagactccgtgaagggccggttcaccatctcccgcgacaattccaagaacacgctgtatctgcaaatgaacagcctgcgtgccgaggacaccgcggtatattactgtgcgacagcggagagggatgatacttttgactactggggtcagggaaccctggtcaccgtctcgagc

SEQ ID NO: 668 - DNA, 354 bp, Homo sapiens
ggggtgcagctgttggagtctgggggaggcttggtacagcctggggggtccctgcgtctctcctgtgcagcctccggattcacctttgcttggtatgatatggggtgggcccgccaggctccagggaagggtctagagtgggtctcacgtattaatgatattggttatgcgacatactacgcagactccgtgaagggccggttcaccatctcccgcgacaattccaagaacacgctgtatctgcaaatgaacagcctgcgtgccgaggacaccgcggtatattactgtgcgacagcggagagggatgatacttttgactactggggtcagggaaccctggtcaccgtctcgagc

SEQ ID NO: 669 - DNA, 354 bp, Homo sapiens
ggggtgcagctgttggagtctgggggaggcttggtacagcctggggggtccctgcgtctctcctgtgcagcctccggattcacctttgcttggtatgatatggggtgggcccgccaggctccagggaagggtctagagtgggtctcaaagattacgtggttgggtaatattacatactacgcagactccgtgaagggccggttcaccatctcccgcgacaattccaagaacacgctgtatctgcaaatgaacagcctgcgtgccgaggacaccgcggtatattactgtgcgacagcggagagggatgatacttttgactactggggtcagggaaccctggtcaccgtctcgagc

SEQ ID NO: 670 - DNA, 354 bp, Homo sapiens
ggggtgcagctgttggagtctgggggaggcttggtacagcctggggggtccctgcgtctctcctgtgcagcctccggattcacctttgcttggtatgatatggggtgggcccgccaggctccagggaagggtctagagtgggtctcagtgattaagtgggttggtgggagtacatactacgcagactccgtgaagggccggttcaccatctcccgcgacaattccaagaacacgctgtatctgcaaatgaacagcctgcgtgccgaggacaccgcggtatattactgtgcgacagcggagagggatgatacttttgactactggggtcagggaaccctggtcaccgtctcgagc

SEQ ID NO: 671 - DNA, 354 bp, Homo sapiens
  misc_feature 82, 106, 163, 267, 330, 346, 352: n = A,T,C or G
tgggtgcagctgttggagtctgggggaggcttggtacagcctggggggtccctgcgtctctcctgtgcagcctccggattcncctttgcttggtattatatggggngggcccgccaggctcctgggaagggtctggagtgggtctcagttattcgtgatgatngtaggggtacatactacgcagactccgtgaagggccggttcaccatctcccgcgacaattccaagaacacgctgaatctgcaaatgaacagcctgcgtgccgangacaccgcggtatattactgtgcgacagcggagagggatgatacttttgactactggggtcanggaaccctggtcaccnttcgcnag

SEQ ID NO: 672 - DNA, 354 bp, Homo sapiens
ggggtgcagctgttggagtctgggggaggcttggtacagcctggggggtccctgcgtctctcctgtgcagcctccggattcacctttgcttggtatgatatggggtgggtccgccaggctccagggaagggtctagagtgggtctcagtgattccgtggattggtcctcctacatactacgcagactccgtgaagggccggttcaccatctcccgcgacaattccaagaacacgctgtatctgcaaatgaacagcctgcgtgccgaggacaccgcggtatattactgtgcgacagcggagagggatgatacttttgactactggggtcagggaaccctggtcaccgtctcgagc

SEQ ID NO: 673 - DNA, 354 bp, Homo sapiens
ggggtgcagctgttggagtctgggggaggcttggtacagcctggggggtccctgcgtctctcctgtgcagcctccggattcacctttgcttggtatgatatggggtgggcccgccaggctccagggaagggtctagagtgggtctcacgtattacggattggggttatgcgacatactacgcagactccgtgaagggccggttcaccatctcccgcgacaactccaagaacacgctgtatctgcaaatgaacagcctgcgtgccgaggacaccgcggtatattactgtgcgacagcggagagggatgatacttttgactactggggtcagggaaccctggtcaccgtctcgagc

SEQ ID NO: 674 - DNA, 354 bp, Homo sapiens
ggggtgcagctgttggagtctgggggaggcttggtacagcctggggggtccctgcgtctctcctgtgcagcctccggattcacctttgcttggtatgatatggggtgggcccgccaggctccagggaagggtctagagtgggtctcagagatttgggataatggtcgttttacatactacgcggactccgtgaagggccggttcaccatctcccgcgacaattccaagaacacgctgtatctgcaaatgaacagcctgcgtgccgaggacaccgcggtatattactgtgcgacagcggagagggatgatacttttgactactggggtcagggaaccctggtcaccgtctcgagc

SEQ ID NO: 675 - DNA, 354 bp, Homo sapiens
ggggtgcagctgttggagtctgggggaggcttggtacagcctggggggtccctgcgtctctcctgtgcagcctccggattcacctttgcttggtatgatatggggtgggcccgccaggctccagggaagggtctagagtgggtctcaagtattgatgattctggtacgcagacatactacgcagactccgtgaagggccggttcaccatctcccgcgacaattccaagaacacgctgtatctggaaatgaacagcctacgtgccgaggacaccgcggtatattactgtgcgacagcggagagggatgatacttatgactactggggtcagggaaccctggtcaccgtctcgagc

SEQ ID NO: 676 - DNA, 354 bp, Homo sapiens
ggggtgcagctgttggagtctgggggaggcttggtacagcctggggggtccctgcgtctctcctgtgcagcctccggattcacctttgcttggtatgatatggggtgggcccgccaggctccagggaagggtctagagtgggtcacaagtattgatgattctggtacgcagacatactacgcagactccgtgaagggccggttcaccatctcccgcgacaattccaagaacacgctgtatctgcaaatgaacagcctgcgtgccgaggacaccgcggtatattactgtgcgacagcggagagggatgatacttatgactactggggtcagggaaccctggtcaccgtctcgagc

SEQ ID NO: 677 - DNA, 354 bp, Homo sapiens
ggggtgcagctgttggagtctgggggaggcttggtacagcctggggggtccctgcgtctctcctgtgcagcctccggattcacctttgcttggtatgatatggggtgggcccgccaggctccagggaagggtctagagtgggtctcaagtattgatgattctggtacgcatacatactacgcagactccgtgaagggccggttcaccatctcccgcgacaattccaagaacacgctgtatctgcaaatgaacagcctgcgtgccgaggacaccgcggtatattactgtgcgacagcggagagggatgatacttatgactactggggtcagggaaccctggtcaccgtctcgagc

SEQ ID NO: 678 - DNA, 354 bp, Homo sapiens
ggggtgcagctgttggagtctgggggaggcttggtacagcctggggggtccctgcgtctctcctgtgcagcctccggattcacctttgcttggtatgatatggggtgggcccgccaggctccggggaagggtctagagtgggtctcaagtattgatgattttggtacgcatacatactacgcagactccgtgaagggccggttcaccatctcccgcgacaattccaagaacacgctgtatctgcaaatgagcagcctgcgtgccgaggacaccgcggtatattactgtgcgacagcggagagggatgatacttttgacttctggggtcagggaaccctggtcaccgtctctagc

SEQ ID NO: 679 - DNA, 354 bp, Homo sapiens
ggggtgcagctgttggagtctgggggaggcttggtacagcctggggggtccctgcgtctctcctgtgcagcctccggattcacctttgcttggtatgatatggggtgggcccgccaggctccagggaagggtctagagtgggtctcaagtattgatgattctggtacgcagacatactacgcagactccgtgaagggccggttcaccatctcccgcgacaattccaagaacatgctgtatctgcaaatgaacagcctgcgtgccgaggacaccgcggtgtattactgtgcgacagcggagagggatgatacttatgactactggggtcagggaaccctggtcaccgtctcgagc

SEQ ID NO: 680 - DNA, 354 bp, Homo sapiens
ggggtgcagctgttggagtctgggggaggcttggtacagcctggggggtccctgcgtctctcctgtgcagcctccggattcacctttgcttggtatgatatggggtgggcccgccaggctccagggaagggtctagagtgggtctcaagtattgatgattctggtacgcagacatactacgcagactccgtgaagggccggttcaccatctcccgcgacaattccaagaacacgctgtatctgcaaatgaacagcctgcgtgccgaggacaccgcggtatattactgtgcggcagcggagtgggatgatacttttgactacaggggtcagggaaccctggtcatcgtctcgagc

SEQ ID NO: 681 - DNA, 354 bp, Homo sapiens
ggggtgcagctgttggagtctgggggaggcttggtacagcctggggggtccctgcgtctctcctgtgcagcctccggattcacctttgcttggtatgatatggggtgggcccgccaggctccagggaagggtctagagtgggtctcaagtattgatgattttggtacgcatacatactacgcagactccgtgaagggccggttcacaatctaccgcgacaattccaagaacacgctgtatctgcaaatgaacagcctgcgtgccgaggacaccgcggtatattactgtgcgacagcggagagggatgatacttttgactactggggtcagggaaccctggtcaccgtctcgagc

SEQ ID NO: 682 - DNA, 354 bp, Homo sapiens
ggggtgcagctgttggagtctgggggaggcttggtacagcctggggggtccctgcgtctctcctgtgcagcctccggattcacctttgcttggtatgatatggggtgggcccgtcaggctccagggaagggtctagagtgggtctcaagtattgatgattttggtacgcacacatactacgcagactccgtgaaggaccggttcaccatctcccgcgacaattccaagaacacgctgtatctgcaaatgaacaacctgcgtgccgaggacaccgcagtatattactgtgcgacagcggagagggatgatacttttgactactggggtcagggaaccctggtcaccgtctcgagc

SEQ ID NO: 683 - DNA, 354 bp, Homo sapiens
ggggtgcagctgttggagtctgggggaggcttggtacagcctggggggtccctgcgtctctcctgtgcagcctccggattcacctttgcttggtatgatatggggtgggcccgccaggctccagggaagggtctagagtgggtctcaagtattgatgattttggcacgcacacatactacgcagactccgtgaagggccggttcaccatctcccgcgacaattccaagaacacgctgtatctgcaaatgaacagcctgcgtgccgaggacaccgcggtatattactgtgcgacagcggagagggatgatacttttgactactggggtcagggaaccctggtcaccgtctcgagc

SEQ ID NO: 684 - DNA, 354 bp, Homo sapiens
ggggtgcagctgttggagtctgggggaggcttggtacagcctggggggtccctgcgtctctcctgtgcagcctccggattcacctttgcttggtatgatatggggtgggcccgccaggctccagggaagggtctagagtgggtctcaagtattgatgattctggtacgcagacatactacgcagactccgtgaagggcaggttcaccatctcccgcgacaattacaagaacacgctgtatctgcaaatgaacagcctgcgtgccgaggacaccgcggtatattactgtgcgacagcggagagggatgatacttttgactactggggtaagggaaccctggtcaccgtctcgagc

SEQ ID NO: 685 - DNA, 354 bp, Homo sapiens
ggggtgcagctgttggagtctgggggaggcttggtacagcctggggggtccctgcgtctctcctgtgcagcctccggattcacctttgcttggtatgatatggggtgggcccgccaggcaccagggaagggtctagagtgggtctcaagtattgatgattctggtacgcagacatactacgcagactccgtgaagggccggttcaccatctcccgcgacaattccaagaacacgctgtatctgcaaatgaacagcctgcgtgccgaggacaccgcggtatattactgtgcgacagcggagatggatgatacttatgactactggggtcagggaaccctggtcaccgtctcgagc

SEQ ID NO: 686 - DNA, 354 bp, Homo sapiens
ggggtgcagctgttggagtctgggggaggcttggttcagcctggggggtccctgcgtctctcctgtgcagcctccggattcacctttgcttggtatgatatggggtgggcccgccaggctccagggaagggactagagtgggtctcaagtattgatgattctggtacgctgacatactacgcagactccgtgaagggccggttcaccatctcccgcgacaattccaagaacacgctgtatctgcaaatgaacagcctgcgtgccgaggacaccgcggtatattactgtgcgacagcggagagggatgatacttatgactactggggtcagggaaccctggtcaccgtctcgagc

SEQ ID NO: 687 - DNA, 354 bp, Homo sapiens
ggggtgcagctgctggagtctgggggaggcttggtacagcctgggaggtccctgcgtctctcctgtgcagcctccggattcacctttgcttggtatgatatggggtgggcccgccaggctccagggaagggtctagagtgggtctcaagtattgatgattctggtacgcagacatactacgcagactccgtgaagggccggttcaccatctcccgcgacaattccaagaacacgctgtatctgcaaatgaacagcctgcgtgccgatgacaccgcggtatattactgtgcgacagcggagagggaagatacttatgactactggggtcagggaaccctggtcaccgtctcgagc

SEQ ID NO: 688 - DNA, 354 bp, Homo sapiens
ggggtgcagctgttggagtctgggggaggcttggtacagcctggggggtccctgcgtctctcctgtgcagcctccggattcatctttgcttggtatgatatggggtgggcccgccaggctccagggaagggtctagagtgggtctcaagtattgatgattctggtacgcagacatactacgcagactccgtgaagggccggttcaccatctcccgcgacaattccaagaacacgctgtatctgcaaatgaacagcctgcgtgccgaggacaccgcggtatattactgtgcgacagcggagagggatgatacttatgactactggggtcagggaaccctggtcaccgtctcgagc

SEQ ID NO: 689 - DNA, 354 bp, Homo sapiens
ggggtgcagctgttggagtctgggggaggcttggtacagcctggggggtccctgcgtctctcctgtgcagcctccggattcacctttgcttggtatgatatggggtgggcccgccaggctccagggaagggtctagagtgggtctcaagtattgatgattctggtacgcagacatactacgcagactcagtgaagggccggttcaccatcacccgcgacaattccaagaacacgctgtatctgcaaatgaacagcctgcgtgccgaggacaccgcggtatattactgtgcgacagcggagagggatgatacttttgactactggggtcagggaaccctggtcaccgtctcgagc

SEQ ID NO: 690 - DNA, 354 bp, Homo sapiens
ggggtgcagctgttggagtctgggggaggcttggtacagcctggggggtccctgcgtctctcctgtgcagcctccggattcatctttgcttggtatgatatggggtgggcccgccaggctccagggaagggtctagagtgggtctcaagtattgatgattctggtacgcagacatactacgcagactccgtgaagggccggttcaccatctcccgcgacaattccaagaacacgctgtatctgcaaatgaacagcctgcgtgccgaggacaccgcggtatattactgtgcgacagcggagagggatgatacttttgactactggggtcagggaaccctggtcaccgtctcgagc

SEQ ID NO: 691 - DNA, 354 bp, Homo sapiens
ggggtgcagctgttggagtctgggggaggcttggtacagcctggggggtccctgcgtctcacctgtgcagcctccggattcacctttgcttggtatgatatggggtgggcccgccaggctccagggaagggtctagagtgggtctcaagtattgatgattctggtacgcagacatactacgcagactccgtgaagggccggttcaccatctcccgcgacaattccaagaacacgctgtatctgcaaatgaacagcctgcgtgccgaggacaccgcggtatattactgtgcgacagcggagagggatgatacttatgactactggggtcagggaaccctggtcaccgtctcgagc

SEQ ID NO: 692 - DNA, 354 bp, Homo sapiens
ggggtgcagctgttggagtctgggggaggcttggtacagcctggggggtccctgcgtctctcctgtgcagcctccggattcacctttgcttggtatgatatggggtgggcccgccaggctccagggaagggtctagagtgggtctcaagtattgatgattctggtacgcggacatactacgcagactccgtgaagggccggttcaccatctcccgcgacaattccaagaacacgctgtatctgcaaatgaacagcctgcgtgccgaggacaccgcggtatattactgtgcgacagcggagagggatgatacttttgactactggggtcagggaaccctggtcaccgtctcgagc

SEQ ID NO: 693 - DNA, 354 bp, Homo sapiens
ggggtgcagctgttggagtctgggggaggcttggtacaacctggggggtccctgcgtctctcctgtgcagcctccggattcacctttgcttggtatgatatggggtgggcccgccaggctccagggaagggtctagagtgggtctcaagtattgatgattctggtacgcagacatactacgcagactccgtgaagggccggttcaccatctcccgcgacaattccaagaacacgctgtatctgcaaatgaacagcctgcgtgccgaggacaccgcggtatattactgtgcgacagcggagagggatgatacttatgactactggggtcagggaaccctggtcaccgtctcgagc

SEQ ID NO: 694 - DNA, 354 bp, Homo sapiens
ggggtgcggctgttggagtctgggggaggcttggtacagcctggggggtccctgcgtctctcctgtgcagcctccggattcacctttgcttggtatgatatggggtgggcccgccaggctccagggaagggtctagagtgggtctcaagtattgatgattctggtacgcagacatactacgcagactccgtgaagggccggttcaccatctcccgcgacaattccaagaacacgctgtatctgcaaatgaacagcctgcgtgccgaggacaccgcggtatattactgtgcgacagcggagagggatgatacttatgactactggggtcagggaaccctggtcaccgtctcgagc

SEQ ID NO: 695 - DNA, 354 bp, Homo sapiens
ggggtgcagctgttggagtctgggggaggcttggtacagcctggggggtccctgcgtctctcctgtgcagcctccggattcacctttgcttggtatgatatggggtgggcccgccaggctccagggaagggtctagagtgggtctcaagtattgatgattctggtacgcagacatactacgcagactccgtgaagggccggttcaccatctcccgcgacaattccaagaacaggctgtatctgcaaatgaacagcctgcgtgccgaggacaccgcggtatattactgtgcgacagcggagagggatgatacttatgactactggggtcagggaaccctggtcaccgtctcgagc

SEQ ID NO: 696 - DNA, 354 bp, Homo sapiens
ggggttcagctgttggagtctgggggaggtttggtacagcctggggggtccctgcgtctctcctgtgcagcctccggattcacctttgcttggtatgatatggggtgggcccgccaggctccagggaaggatctagagtgggtctcaagtattgatgattctggtacgcagacatactacgcagactccgtgaagggccggttcaccatctcccgcgacaattccaagaacacgctgtatctgcaaatgaacagcctgcgtgccgaggacaccgcggtatattactgtgcgacagcggagagggatgatacttatgactactggggtcagggaaccctggtcaccgtctcgagc

SEQ ID NO: 697 - DNA, 354 bp, Homo sapiens
ggggtgcagctgttggagtctgggggaggcttggtacagcctggggggtccctgcgtctctcctgtgcagcctccggattcacctttgcttggtatgatatggggtgggcccgccaggctccagggaagggtctagagtgggtctcaagtattgatgattctggtacgcggacatactacgcagactccgtgaagggccggttcaccatctcccgcgacaattccaagaacacgctgtatctgcaaatgaacagcctgcgtgccgaggacaccgcggtttattactgtgcgacagcggagagggatgatacttatgattactggggtcagggaaccctggtcaccgtctcgagc

SEQ ID NO: 698 - DNA, 354 bp, Homo sapiens
ggggtgcagctgttggagtctgggggaggcttggtacagcctggggggtccctgcgtctctcctgtgcagcctccggattcacctttgcatggtatgatatggggtgggcccgccaggctccagggaagggtctagagtgggtctcaactattgatgattctggtacgcagacatactacgcagactccgtgaagggccggttcaccatctcccgcgacaattccaagaacacgctgtatctgcaaatgaacagcctgcgtgccgaggacaccgcagtatattactgtgcgacagcggagttggaagatacttttgactactggggtcagggaaccctggtcacagtctctagc

SEQ ID NO: 699 - DNA, 354 bp, Homo sapiens
  misc_feature 165, 224: n = A,T,C or G
ggggtgcagctgttggagtctgggggaggcttggtacagcctggggggtccctgcgtctctcctgtgcagcctccggattcacctttgcttggtatgatatggggtgggcccgccaggctccagggaagggtctagagtgggtctcaagtattgatgattctggnacgcagacatactacgcagactccgtgaagggccggttcaccatctcccgcgacaattncaagaacacgctgtatctgcaaatgaacagcctgcgtgccgaggacaccgcggtatattactgtgcgacagcggagagggatgatacttttgactactggggtcagggaaccctggtcaccgtctcgagc

SEQ ID NO: 700 - DNA, 354 bp, Homo sapiens
ggggtgcagctgttggagtctgggggaggcttggtacagcctggggggtccctgcgtctctcctgtgcagcctccggattcacctttgcttggtatgatatggggtgggcccgccaggctccagggaagggtctagagtgggtctcaagtattgatgattctggtacgcggacatactacgcaggctccgtgaagggccggttcaccatctcccgcgacaattccaagaacacgctgtatctgcaaatgaacagcctgcgtgccgaggacaccgcggtatattactgtgcgacagcggagagggatgatacttatgactactggggtcagggaaccctggtcaccgtctcgagc

SEQ ID NO: 701 - DNA, 354 bp, Homo sapiens
ggggtgcagctgttggagtctgggggaggcttggtacagcctggggggtccctgcgtctctcctgtgcagcctccggattcacctttgcttggtatgatatggggtgggcccgccaggctccagggaagggtctagagtgggtctcaagtattgatgattctggtaggcagacatactacgcagactccgtgaagggccggttcaccatctcccgcgacaattccaagaacacgctgtatctgcaaatgaacagcctgcgtgccgaggacaccgcggtatattactgtgcgacagcggagagggatgatacttatgactactggggtcagggaaccctggtcaccgtctcgagc

SEQ ID NO: 702 - DNA, 354 bp, Homo sapiens
ggggtgcagctgttggagtctgggggaggcttggtacagcctggggggtccctgcgtctctcctgtgcagcctccggattcacctttgcttggtatgatatggggtgggcccgccaggctccagggaagggtctagagtgggtctcaagtattgatgattctggtacgcagacatactacgcagactccgtgaagggccggttcaccatctcccgcgacaattccaagaacatgctgtatctgcaaatgaacagcctgcgtgccgaggacaccgcggtatattactgtgcgacagcggagagggatgatacttttgactactggggtcagggaaccctggtcaccgtctcgagc

SEQ ID NO: 703 - DNA, 354 bp, Homo sapiens
ggggtgcagctgttggagtctgggggaggcttggtacagcctggggggtccctgcgtctctcctgtgcagcctccggattcacctttgcttggtatgatatggggtgggcccgccaggctccagggaagggtctagagtgggtctcaagtattgatgattctggtacgcagacatactacgcagactccgtgaagggccggttcaccatctcccgcgacaattccaagaacaagctgtatctgcaaatgaacagcctgcgtgccgaggacaccgcggtatattactgtgcgacagcggagagggatgatacttatgactactggggtcagggaaccctggtcaccgtctcgagc

SEQ ID NO: 704 - DNA, 354 bp, Homo sapiens
ggggtgcagctgttggagtctgggggaggcttggtacagcctggggggtccctgcgtctctcctgtgcagcctccggattcacctttgtttggtatgatatggggtgggcccgccagactccagggaagggtcttgagtgggtctcaagtattgatgattctggtacgcagacatactatgcagactccgtgaagggccggttcaccatctcccgcgacaattccaagaacacgctgtatctgcaaatgaacagcctgcgtgccgaggacaccgcggtatattactgtgcgacagcggagagtgatgatacttatgactactggggtcagggaaccctggtcaccgtctcgagc

SEQ ID NO: 705 - DNA, 354 bp, Homo sapiens
ggggtgcagctgttggagtctgggggaggcttggtacagcctggggggtccctgcgtctctcctgtgcagcctccggattcacctttgcttggtatgatatggggtgggcccgccaggctccagggaagggtctagagtgggtctcaagtattgatgattctggtacgcagacatactacgcagactccgtgaagggccggttcaccatctcccgcgacaattccaagaacacgctgtatctgcaaatgaacagcctgcgtgccgaggacaccgcggtatattactgtgcgacagcggagagggatgatatttttgactactggggtcagggtaccctggtcaccgtctcgagc

SEQ ID NO: 706 - DNA, 354 bp, Homo sapiens
ggggtgcagctgttggagtctgggggaggcttggtacagcctggggggtccctgcgtctctcctgtgcagcctccggattcacctttgcttggtatgatatggggtgggcccgccaggctccagggaagggtctagagtgggtctcaagtattgatgattctggtacgcagacatactacgcagactccgtgaagggccggttcaccatctcccgcgacaattccaagaacacgctgtatctgcaaatgaagagcctgcgtgccgaggacaccgcggtatattactgtgcgacagcggagagggatgatacttctgactactggggtcagggaaccctggtcaccgtctcgagc

SEQ ID NO: 707 - DNA, 354 bp, Homo sapiens
ggggtgcagctgttggagtctgggggaggcttggtacagcctggggggtccctgcgtctctcctgtgcagcctccggattcacctttgcttggtatgatatggggtgggtccgccaggctccagagaagggtctagagtgggtctcaagtattgatgattctggtacgcagacatactacgcagactccgtgaagggccggttcaccatctcccgcgacaattccaagaacacgctgtatctgcaaatgaacagcctgcgtgccgaggacaccgcggtatattactgtgcgacagcggagagggaagatagttatgactactggggtcagggaaccctggtcaccgtctcgagc

SEQ ID NO: 708 - DNA, 354 bp, Homo sapiens
ggggtgcagctgttggagtctgggggaggcttggtacagcctggggggtccctgcgtctctcctgtgcagcctccggattcacctttgcttggtatgatatggggtgggcccgccaggctccagggaagggtctagagtgggtctcagtgattgattggcatggtactgttacatactacgcagactccgtgaagggccggttcaccatctcccgcgacaattccaagaacacgctgtatctgcaaatgaacagcctgcgtgccgaggacaccgcggtatattactgtgcgacagcggagagggatgatacttttgactactggggtcagggaaccctggtcaccgtctcgagc

SEQ ID NO: 709 - DNA, 354 bp, Homo sapiens
ggggtgcagctgttggagtctgggggaggcttggtacagcctggggggtccctgcgtctctcctgtgcagcctccggattcacctttgcttggtatgatatggggtgggcccgccaggctccagggaagggtctagagtgggtctcaattattacggatacgggtgggcgtacatactacgcagactccgtgaagggccggttcaccatctcccgcgacaattccaagaacacgctgtatctgcaaatgaacagcctgcgtgccgaggacaccgcggtatattactgtgcgacagcggagagggatgatacttttgactactggggtcagggaaccctggtcaccgtctcgagc

SEQ ID NO: 710 - DNA, 354 bp, Homo sapiens
ggggtgcagctgttggagtctgggggaggcttggtacagcctggggggtccctgcgtctctcctgtgcagcctccggattcacctttgcttggtatgatatggggtgggcccgccaggctccagggaagggtcttgagtgggtctcaactattgattggaggggtacgattacatactacgcagactccgtgaagggccggttcaccatctcccgcgacaattccaagaacacgctgtatctgcaaatgaacagcctgcgtgccgaggacaccgcggtatattactgtgcgacagcggagagggatgatacttttgactactggggtcagggaaccctggtcaccgtctcgagc

SEQ ID NO: 711 - DNA, 354 bp, Homo sapiens
ggggtgcagctgttggagtctgggggaggcttggtacagcctggggggtccctgcgtctctcctgtgcagcctccggattcacctttgcttggtatgatatggggtgggcccgccaggctccagggaagggtctagagtgggtctcaagtattgattggcatggtgatgttacatactacgcagactccgtgaagggccggttcaccatctcccgcgacaattccaagaacacgctgtatctgcaaatgaacagcctgcgtgccgaggacaccgcggtatattactgtgcgacagcggagagggatgatacttttgactactggggtcagggaaccctggtcaccgtctcgagc

SEQ ID NO: 712 - DNA, 354 bp, Homo sapiens
ggggtgcagctgttggagtctgggggaggcttggtacagcctggggggtccctgcgtctctcctgtgcagcctccggattcacctttgcttggtatgatatggggtgggcccgccaggctccagggaagggtctagagtgggtctcaactattgattggcatggttctgagacatactacgcagactccgtgaagggccggttcaccatctcccgcgacaattccaagaacacgctgtatctgcaaatgaacagcctgcgtgccgaggacaccgcggtatattactgtgcgacagcggagagggatgatacttttgactactggggtcagggaaccctggtcaccgtctcgagc

SEQ ID NO: 713 - DNA, 354 bp, Homo sapiens
ggggtgcagctgttggagtctgggggaggcttggtacagcctggggggtccctgcgtctctcctgtgcagcctccggattcacctttgcttggtatgatatggggtgggcccgccaggctccagggaagggtctagagtgggtctcaactatttcttggcttggtactcatacatactacgcagactccgtgaagggccggttcaccatctcccgcgacaattccaagaacacgctgtatctgcaaatgaacagcctgcgtgccgaggacaccgcggtatattactgtgcgacagcggagagggatgatacttttgactactggggtcagggaaccctggtcaccgtctcgagc

SEQ ID NO: 714 - DNA, 354 bp, Homo sapiens
ggggtgcagctgttggagtctgggggaggcttggtacagcctggggggtccctgcgtctctcctgtgcagcctccggattcacctttgcttggtatgatatggggtgggcccgccaggctccagggaagggtctagagtgggtctcaagtattgattggcatggtacgagtacatactacgcagactccgtgaagggccggttcaccatctcccgcgacaattccaagaacacgctgtatctgcaaatgaacagcctgcgtgccgaggacaccgcggtatattactgtgcgacagcggagagggatgatacttttgactactggggtcagggaaccctggtcaccgtctcgagc

SEQ ID NO: 715 - DNA, 354 bp, Homo sapiens
ggggtgcagctgttggagtctgggggaggcttggtacagcctggggggtccctgcgtctctcctgtgcagcctccggattcacctttgcttggtatgatatggggtgggcccgccaggctccagggaagggtctagagtgggtctcaactattgattggcatggtgttgttacatactacgcagactccgtgaagggccggttcaccatctcccgcgacaattccaagaacacgctgtatctgcaaatgaacagcctgcgtgccgaggacaccgcggtatattactgtgcgacagcggagagggatgatacttttgactactggggtcagggaaccctggtcaccgtctcgagc

SEQ ID NO: 716 - DNA, 354 bp, Homo sapiens
ggggtgcagctgttggagtctgggggaggcttggtacagcctggggggtccctgcgtctctcctgtgcagcctccggattcacctttgcttggtatgatatggggtgggcccgccaggctccagggaagggtctagagtgggtctcaagtattgattggcatggtaatgttacatactacgcagactccgtgaagggccggttcaccatctcccgcgacaattccaagaacacgctgtatctgcaaatgaacagcctgcgtgccgaggacaccgcggtatattactgtgcgacagcggagagggatgatacctttgactactggggtcagggaaccctggtcaccgtctcgagc

SEQ ID NO: 717 - DNA, 354 bp, Homo sapiens
ggggtgcagctgttggagtctgggggaggcttggtacagcctggggggtccctgcgtctctcctgtgcagcctccggattcacctttgcttggtatgatatggggtgggtccgccaggctccagggaagggtctagagtgggtctcacagattgattggcatggtcttgcgacatactacgcagactccgtgaagggccggttcaccatctcccgcgacaattccaagaacacgctgtatctgcaaatgaacagcctgcgtgccgaggacaccgcggtatattactgtgcgacagcggagagggatgatacttttgactactggggtcagggaaccctggtcaccgtctcgagc

SEQ ID NO: 718 - DNA, 354 bp, Homo sapiens
ggggtgcagctgttggagtctgggggaggcttggtacagcctggggggtccctgcgtctctcctgtgcagcctccggattcacctttgcttggtatgatatggggtgggtccgccaggctccagggaagggtctagagtgggtctcaagtattgattggcatggtaataagacatactacgcagactccgtgaagggccggttcaccatctcccgcgacaattccaagaacacgctgtatctgcaaatgaacagcctgcgtgccgaggacaccgcggtatattactgtgcgacagcggagagggatgatacttttgactactggggtcagggaaccctggtcaccgtctcgagc

SEQ ID NO: 719 - DNA, 354 bp, Homo sapiens
ggggtgcagctgttggagtctgggggaggcttggtacagcctggggggtccctgcgtctctcctgtgcagcctctggattcaccttcgcttggtatgatatggggtgggtccgccaggctccagggaagggtctagagtgggtctcaagtattgattggcatggtcgtcctacatactacgcagactccgtgaagggccggttcaccatctcccgcgacaattccaagaacacgctgtatctgcaaatgaacagcctgcgtgccgaggacaccgcggtatattactgtgcgacagcggagagggatgatacttttgactactggggtcagggaaccctggtcaccgtctcgagc

SEQ ID NO: 720 - DNA, 354 bp, Homo sapiens
ggggtgcagctgttggagtctgggggaggcttggtacagcctggggggtccctgcgtctctcctgtgcagcctccggattcacctttgcttggtatgatatggggtgggtccgccaggctccagggaagggtctagagtgggtctcaaagatttctgatcttggttgtccgacatactacgcagactccgtgaagggccggttcaccatctcccgcgacaattccaagaacacgctgtatctgcaaatgaacagcctgcgtgccgaggacaccgcggtatattactgtgcgacagcggagagggatgatacttttgactactggggtcagggaaccctggtcaccgtctcgagc

SEQ ID NO: 721 - DNA, 354 bp, Homo sapiens
ggggtgcagctgttggagtctgggggaggcgtggtacagcctggggggtccctgcgtctctcctgtgcagcctccggattcacctttgcttggtatgatatggggtgggcccgccaggctccagggaagggtctagagtgggtctcaaagattacggattatggttttgctacatactacgcagactccgtgaagggccggttcaccgtctcccgcgacaattccaagaacacgctgtatctgcaaatgaacagcctgcgtgccgaggacaccgcggtatattactgtgcgacagcggagagggatgatacttttgactactggggtcagggaaccctggtcaccgtctcgagc

SEQ ID NO: 722 - DNA, 354 bp, Homo sapiens
ggggtgcagctgttggagtctgggggaggcttggtacagcctggggggtccctgcgtctctcctgtgcagcctccggattcacctttgcttggtatgatatggggtgggcccgccaggctccagggaagggtctagagtgggtctcaaagattactgatcttggttatgctacatactacgcagactccgtgaagggccggttcaccatctcccgcgacaattccaagaacacgctgtatctgcaaatgaacagcctgcgtgccgaggacaccgcggtatattactgtgcgacagcggagagggatgatacttttgactactggggtcagggaaccctggtcaccgtctcgagc

SEQ ID NO: 723 - DNA, 354 bp, Homo sapiens
ggggtgcagctgttggagtctgggggaggcttggtacagcctggggggtccctgcgtctctcctgtgcagcctccggattcacctttgcttggtatgatatggggtgggcccgccaggctccagggaagggtctagagtgggtctcaaggattgaggataatggtcggcatacatactacgcagactccgtgaagggccggttcaccatctcccgcgacaattccaagaacacgctgtatctgcaaatgaacagcctgcgtgccgaggacaccgcggtatattactgtgcgacagcggagagggatgatacttttgactactggggtcagggaaccctggtcaccgtctcgagc

SEQ ID NO: 724 - DNA, 354 bp, Homo sapiens
ggggtgcagctgttggagtctgggggaggcttggtacagcctggggggtccctgcgtctctcctgtgcagcctccggattcacctttgcttggtatgatatggggtgggcccgccaggctccagggaagggtctagagtgggtctcaactattgatgatttgggtcgtcatacatactacgcagactccgtgaagggccggttcaccatctcccgcgacaattccaagaacacgctgtatctgcaaatgaacagcctgcgtgccgaggacaccgcggtatattactgtgcgacagcggagagggatgatacttttgactactggggtcagggaaccctggtcaccgtctcgagc

SEQ ID NO: 725 - DNA, 354 bp, Homo sapiens
ggggtgcagctgttggagtctgggggaggcttggtacagcctggggggtccctgcgtctctcctgtgcagcctccggattcacctttgcttggtatgatatggggtgggcccgccaggctccagggaagggtctagagtgggtctcaactattagttggttgggtggtaatacatactacgcagactccgtgaagggccggttcaccatctcccgcgacaattccaagaacacgctgtatctgcaaatgaacagcctgcgtgccgaggacaccgcggtatattactgtgcgacagcggagagggatgatacttttgactactggggtcagggaaccctggtcaccgtctcgagc

SEQ ID NO: 726 - DNA, 354 bp, Homo sapiens
ggggtgcagctgttggagtctgggggaggcttggtacagcctggggggtccctgcgtctctcctgtgcagcctccggattcacctttgcttggtatgatatggggtgggtccgccaggctccagggaagggtctggagtgggtctcaacgattactgatttgggttatgcgacatactacgcagactccgtgaagggccggttcaccatctcccgcgacaattccaagaacacgctgtatctgcaaatgaacagcctgcgtgccgaggacaccgcggtatattactgtgcgacagcggagagggatgatacttttgactactggggtcagggaaccctggtcaccgtctcgagc

SEQ ID NO: 727 - DNA, 354 bp, Homo sapiens
ggggtgcagctgttggagtctgggggaggcttggtacagcctggggggtccctgcgtctctcctgtgcagcctccggattcacctttgcttggtatgatatggggtgggcccgccaggctccagggaagggtctagagtgggtctcaagtattgatgattctggtacgcagacatactacgcagactccgtgaggggccggttcaccatctcccgcgacaattccaagaacacgctgtatctgcaaatgaacagcctgcgtgccgaggacaccgcggtatattactgtgcgacagcggagagggatgatacttatgactactggggtcagggaaccctggtcaccgtctcgagc

SEQ ID NO: 728 - DNA, 354 bp, Homo sapiens
ggggtgcagctgttggagtctgggggaggcttggtacagcctggggggtccctgcgtctctcctgtgcagcctccggattcacctttgcttggtatgatatggggtgggcccgccaggctccagggaagggtctagagtgggtctcaagtattgatgattctggtacgcaggcatactacgcagactccgtgaagggccggttcaccatctcccgcgacaattccaagaacacgctgtatctgcaaatgaacagcctgcgtgccgaggacaccgcggtatattactgtgcgacagcggagagggatgatacttatgactactggggtcagggaaccctggtcaccgtctcgagc

SEQ ID NO: 729 - DNA, 354 bp, Homo sapiens
ggggtgcagctgttggagtctgggggaggcttggtacagcctggggggtccctgcgtctctcctgtgcagcctccggattcacctttgcttggtatgatatggggtgggcccgccaggctccagggaagggtctagagtgggtctcaagtattgatgattctggtatgcggacatactacgcagactccgtgaagggccggttcaccatctcccgcgacaattccaagaacacgctgtatctgcaaatggacagcctgcgtgccgaggacaccgcggtatattactgtgcgacagcggagagggatgatacttttgactactggggtcagggaaccctggtcaccgtctcgagc

SEQ ID NO: 730 - DNA, 354 bp, Homo sapiens
ggggtgcagctgttggagtctgggggaggcttggtacagcctggggggtccatgcgtctctcctgtgcagcctccggattcacctttgcttggtatgatatggggtgggcccgccaggctccagggaagggtctagagtgggtctcaagtattgatgattctggtacgcagacatactatgcagactccgtgaagggccggttcaccatctcccgcgacaattccaagaacacgctgtatctgcaaatgaacagcctgcgtgccgaggacaccgcggtatattactgtgcgacagcggagagggatgatacttatgactactggggtcagggaaccctggtcaccgtctcgagc

SEQ ID NO: 731 - DNA, 354 bp, Homo sapiens
ggggtgcagctgttggagtctgggggaggcttgatacagcctggggggtccctgcgtctctcctgtgcagcctccggattcacctttgcttggtatgatatggggtgggcccgccaggctccagggaagggtctagagtgggtctcaagtattgatgattctggtacgcagacatactacgcagactccgtgaagggccggttcaccatctcccgcgacaattccaagaacacgctgtatctgcaaatgaacagcctgcgtgccgaggacaccgcggtatattactgtgcgacagcggagagggatgatacttatgactactggggtcagggaaccctggtcaccgtctcgagc

SEQ ID NO: 732 - DNA, 354 bp, Homo sapiens
ggggtgcagctgttggagtctgggggaggcttggtacagcctggggggtccctgcgtctctcctgtgcagcctccggattcacctttgcttggtatgatatggggtgggcccgccaggctccagggaagggtctagagtgggtctcaagtattgatgattctggtacgcagacatactacgcagactcagtgaagggccggttcaccatctcccgcgacaatttcaagaacacgctgtatctgcaaatgaacagcctgcgagccgaggacaccgcggtatattactgtgcgacagcggagagggatgatacttatgactactggggtcagggaaccctggtcaccgtctcgagc

SEQ ID NO: 733 - DNA, 354 bp, Homo sapiens
ggggtgcagctgttggagtctgggggaggcttggtacagcctggggggtccctgcgtctctcctgtgcagcctccggattcacctttgcttggtatgatatggggtgggcccgccaggctccagggaagggtctagagtgggtctcaagtattgatgattctggtacgcagacatactacgcagactccgtgaagggccggttcaccatctcccgcgacaattccaagaacacgctgtatctgcaaatgagcagcctgcgtgccgaggacaccgcggtatattactgtgcgacagcggagagggatgatacttatgactactggggtcagggaaccctggtcaccgtctcgagc

SEQ ID NO: 734 - DNA, 354 bp, Homo sapiens
ggggtgcagctgttggagtctgggggaggcttggtacagcctggggggtccctgcgtctctcctgtgcagcctccggattcacctttgcttggtatgatatggggtgggcccgccaggctccagggaagggtctagagtgggtctcaagtattgatgattctggtacgcagacatactacgcagactccgtgaagggccggttcaccatctcccgcgacaattccaagaacacgctgtatctgcaaatggacagcctgcgtgccgaggacaccgcggtatattactgtgcgacagcggagagggatgatacttatgactactggggtcagggaaccctggtcaccgtctcgagc

SEQ ID NO: 735 - DNA, 354 bp, Homo sapiens
ggggtgcagctgttggagtctgggggaggcttggtacagcctggggggtccctgcgtctctcctgtgcagcctccggattcacctttgcttggtatgatatggggtgggcccgccaggctccagggaagggtctagagtgggtctcaagtattgatgattctggtatgcagacttactacgcagactccgtgaagggccggttcaccatctcccgcgacaattccaagaacacgctgtatctgcaaatgaacagcctgcgtaccgaggataccgcggtatattactgtgcgacagcggagagggatgatacttttgactactggggtcagggaaccctggtcaccgtctcgagc

SEQ ID NO: 736 - DNA, 354 bp, Homo sapiens
ggggtgcagctgttggagtctgggggaggcttggtacagcctggggggtccctgcgtctctcctgtgcagcctccggattcacctttgcttggtatgatatggggtgggcccgccaggctccagggaagggtctagagtgggtctcaagtattgatgattctggtacgcatacatactacgcagactccgtgaagggccggttcaccatctcccgcgacaattccaagaacacgctgtatctgcaaatgaacagcctgcgtgccgaggacaccgcggtatattactgtgcgacagcggagagggatgatacttttgactactggggtcagggaaccctggtcaccgtctcgagc

SEQ ID NO: 737 - DNA, 354 bp, Homo sapiens
ggggtgcagctgttggagtctgggggaggcttggtacagcctggggggtccctgcgtctctcctgtgcagcctccggattcatctttgcttggtatgatatggggtgggcccgccaggctccagggaagggtctagagtgggtctcaagtattgattggcatggtaatgttacatactacgcagactccgtgaagggccggttcaccatctcccgcgacaattccaagaacacgctgtatctgcaaatgaacagcctgcgtgccgaggacaccgcggtatattactgtgcgacagcggagagggatgatacctttgactactggggtcagggaaccctggtcaccgtctcgagc

SEQ ID NO: 738 - DNA, 354 bp, Homo sapiens
ggggtgcagctgttggagtctgggggaggcttggtacagcctggggggtccctgcgtctctcctgtgcagcctccggattcatctttgcttggtatgatatggggtgggcccgccaggctccagggaagggtctagagtgggtctcaagtattgattggcatggtaatgttacatactacgcagactccgtgaagggccggttcaccatctcccgcgacaattccaagaacacgctgtatctgcaaatgaacagcctgcgtgccgaggacaccgcggtatattactgtgcgacagcggagagggatgatacttatgactactggggtcagggaaccctggtcaccgtctcgagc

SEQ ID NO: 739 - DNA, 354 bp, Homo sapiens
ggggtgaagctgttggagtctgggggaggcttggtacagcctggggggtccctgcgtctctcctgtgcagcctccggattcacctttgcttggtatgatatggggtgggcccgccaggctccagggaagggtctagagtgggtctcaagtattgattggcatggtaatgttacatactacgcagactccgtgaagggccggttcaccatctcccgcgacaattccaagaacacgctgtatctgcaaatgaacagcctgcgtgccgaggacaccgcggtatattactgtgcgacagcggagagggatgatacctttgactactggggtcagggaaccctggtcaccgtctcgagc

SEQ ID NO: 740 - DNA, 354 bp, Homo sapiens
ggggtgcagctgttggagtctgggggaggcttggtacagcctggggggtccctgcgtctctcctgtgcagcctccggattcacctttgcttggtatgatatggggtgggtccgccaggctccagggaagggtctagagtgggtctcaagtattgattggcatggtaatgttacatactacgcagactccgtgaagggccggttcaccatctcccgcgacaattccaagaacacgctgtatctgcaaatgaacagcctgcgtgccgaggacaccgcggtatattactgtgcgacagcggagagggatgatacctttgactactggggtcagggaaccctggtcaccgtctcgagc

SEQ ID NO: 741 - DNA, 354 bp, Homo sapiens
ggggtgcagctgttggagtctgggggaggcttggtacagcctggggggtccctgcgtctctcctgtgcagcctccggattcacctttgcttggtatgatatggggtgggcccgccaggctccagggaagggtctagagtgggtctcacatattgattggcatggtaatcatacatactacgcagactccgtgaagggccggttcaccatctcccgcgacaattccaagaacacgctgtatctgcaaatgaacagcctgcgtgccgaggacaccgcggtatattactgtgcgacagcggagagggatgatacttttgactactggggtcagggaaccctggtcaccgtctcgagc

SEQ ID NO: 742 - DNA, 354 bp, Homo sapiens
ggggtgcagctgttggagtctgggggaggcttggtacagcctggggggtccctgcgtctctcctgtgcagcctccggattcacctttgcttggtatgatatggggtgggcccgccaggctccagggaggggtctagagtgggtctcaacgattaattggcatggtaataatacatactacgcagactccgtgaagggccggttcaccatctcccgcgacaattccaagaacacgctgtatctgcaaatgaacagcctgcgtgccgaggacaccgcggtatattactgtgcgacagcggagagggatgatacttttgactactggggtcagggaaccctggtcaccgtctcgagc

SEQ ID NO: 743 - DNA, 354 bp, Homo sapiens
ggggtgcagctgttggagtctgggggaggcttggtacagcctggggggtccctgcgtctctcctgtgcagcctccggattcacctttgcttggtatgatatggggtgggcccgccaggctccagggaagggtctagagtgggtctcaactattaattggcatggtgctgtgtcatactacgcagactccgtgaagggccggttcaccatctcccgcgacaattccaagaacacgctgtatctgcaaatgaacagcctgcgtgccgaggacaccgcggtatattactgtgcgacagcggagagggatgatacttttgactactggggtcagggaaccctggtcaccgtctcgagc

SEQ ID NO: 744 - DNA, 354 bp, Homo sapiens
ggggtgcagctgttggagtctgggggaggcttggtacagcctggggggtccctgcgtctctcctgtgcagcctccggattcacctttgcttggtatgatatggggtgggcccgccaggctccagggaagggtctagagtgggtctcattgattgattggatgggtcatgttacatactacgcagactccgtgaagggccggttcaccatctcccgcgacaattccaagaacacgctgtatctgcaaatgaacagcctgcgtgccgaggacaccgcggtatattactgtgcgacagcggagagggatgatacttttgactactggggtcagggaaccctggtcaccgtctcgagc

SEQ ID NO: 745 - DNA, 354 bp, Homo sapiens
ggggtgcagctgttggagtctgggggaggcttggtacagcctggggggtccctgcgtctctcctgtgcagcctccggattcacctttgcctggtatgatatggggtgggcccgccaggctccagggaagggtctagagtgggtctcaaagattgattggcatggtagtgttacatactacgcagactccgtgaagggccggttcaccatctcccgcgacaattccaagaacacgctgtatctgcaaatgaacagcctgcgtgccgaggacaccgcggtatattactgtgcgacagcggagggggatgatacttttgactactggggtcagggaaccctggtcaccgtctcgagc

SEQ ID NO: 746 - DNA, 354 bp, Homo sapiens
ggggtgcagctgttggagtctgggggaggcttggtacagcctggggggtccctgcgtctctcctgtgcagcctccggattcacctttgcttggtatgatatggggtgggcccgccaggctccagggaagggtctagagtgggtctcaactattgattggcatggtgagccgacatactacgcagactccgtgaagggccggttcaccatctcccgcgacaattccaagaacacgctgtatctgcaaatgaacagcctgcgtgccgaggacaccgcggtatattactgtgcgacagcggagagggatgatacttttgactactggggtcagggaaccctggtcaccgtctcgagc

SEQ ID NO: 747 - DNA, 354 bp, Homo sapiens
ggggtgcagctgttggagtctgggggaggcttggtacagcctggggggtccctgcgtctctcctgtgcagcctccggattcacctttgcttggtatgatatggggtgggcccgccaggctccagggaagggtctagagtgggtctcaacgattgattggcatggtcagcttacatactacgcagactccgtgaagggccggttcaccatctcccgcgacaattccaagaacacgctgtatctgcaaatgaacagcctgcgtgccgaggacaccgcggtatattactgtgcgacagcggagagggatgatacttttgactactggggtcagggaaccctggtcaccgtctcgagc

SEQ ID NO: 748 - DNA, 354 bp, Homo sapiens
ggggtgcagctgttggagtctgggggaggcttggtacagcctggggggtccctgcgtctctcctgtgcagcctccggattcacctttgcttggtatgatatggggtgggcccgccaggctccagggaagggtctagagtgggtctcaacgattgattggttgggttcggttacatactacgcagactccgtgaagggccggttcaccatctcccgcgacaattccaagaacacgctgtatctgcaaatgaacagcctgcgtgccgaggacaccgcggtatattactgtgcgacagcggagagggatgatacttttgactactggggtcagggaaccctggtcaccgtctcgagc

SEQ ID NO: 749 - DNA, 354 bp, Homo sapiens
ggggtgcagctgttggagtctgggggaggcttggtacagcctggggggtccctgcgtctctcctgtgcagcctccggattcacctttgcttggtatgatatggggtgggcccgccaggctccagggaagggtctagagtgggtctcagctattgatgatctgggtcggaggacatactacgcagactccgtgaagggccggttcaccatctcccgcgacaattccaagaacacgctgtatctgcaaatgaacagcctgcgtgccgaggacaccgcggtatattactgtgcgacagcggagagggatgatacttttgactactggggtcagggaaccctggtcaccgtctcgagc

SEQ ID NO: 750 - DNA, 354 bp, Homo sapiens
ggggtgcagctgttggagtctgggggaggcttggtacagcctggggggtccctgcgtctctcctgtgcagcctccggattcacctttgcttggtatgatatggggtgggcccgccaggctccagggaagggtctagagtgggtctcatcgattgatgatcggggtaggtatacatactacgcagactccgtgaagggccggttcaccatctcccgtgacaattccaagaacacgctgtatctgcaaatgaacagcctgcgtgccgaggacaccgcggtatattactgtgcgacggcggagagggatgatacttttgactactggggtcagggaaccctggtcaccgtctcgagc

SEQ ID NO: 751 - DNA, 354 bp, Homo sapiens
ggggtgcagctgttggagtctgggggaggcttggtacagcctggggggtccctgcgtctctcctgtgcagcctccggattcacctttgcttggtatgatatggggtgggcccgccaggctccagggaagggtctagagtgggtctcagttattagtgattatggtcgtggtacatactacgcagactccgtgaagggccggttcaccatctcccgcgacaattccaagaacacgctgtatctgcaaatgaacagcctgcgtgccgaggacaccgcggtatattactgtgcgacagcggagggggatgatacttttgactactggggtcagggaaccctggtcaccgtctcgagc

SEQ ID NO: 752 - DNA, 354 bp, Homo sapiens
ggggtgcagctgttggagtctgggggaggcttggtacagcctggggggtccctgcgtctctcctgtgcagcctccggattcacctttgcttggtatgatatggggtgggcccgccaggctccagggaagggtctagagtgggtctcaagtattgatgattcgggtcggtatacatactacgcagactccgtgaagggccggttcaccatctcccgcgacaattccaagaacacgctgtatctgcaaatgaacagcctgcgtgccgaggacaccgcggtatattactgtgcgacagcggagagggatgatacttttgactactggggtcagggaaccctggtcaccgtctcgagc

SEQ ID NO: 753 - DNA, 354 bp, Homo sapiens
ggggtgcagctgttggagtctgggggaggcttggtacagcctggggggtccctgcgtctctcctgtgcagcctccggattcacctttgcttggtatgatatggggtgggcccgccaggctccagggaagggtctagagtgggtctcagtgattgatgatgttggtagggggacatactacgcagactccgtgaagggccggttcaccatctcccgcgacaattccaagaacacgctgtatctgcaaatgaacagcctgcgtgccgaggacaccgcggtatattactgtgcgacagcggagagggatgatacttttgactactggggtcagggaaccctggtcaccgtctcgagc

SEQ ID NO: 754 - DNA, 355 bp, Homo sapiens
  misc_feature 322, 337: n = A,T,C or G
ggggtgcagctgttggagtctgggggaggcttggtacagcctggggggtccctgcgtctctcctgtgcagcctccggattcatctttgcttggtatgatatggggtgggcccgccaggctccagggaagggtctagagtgggtctcaagtattgattggcatggtaatgttacatactacgcagactccgtgaagggccggttcaccatctcccgcgacaattccaagaacacgctgtatctgcaaatgaacagcctgcgtgccgaggacaccgcggtatattactgtgcgacagcggagatcacgaaggggtatgagctanctggggtcagggaanccctggtcaccgttctac

SEQ ID NO: 755 - DNA, 354 bp, Homo sapiens
ggggtgcagctgttggagtctgggggaggcttggtacagcctggggggtccctgcgtctctcctgtgcagcctccggattcatctttgcttggtatgatatggggtgggcccgccaggctccagggaagggtctagagtgggtctcaagtattgattggcatggtaatgttacatactacgcagactccgtgaagggccggttcaccatctcccgcgacaattccaagaacacgctgtatctgcaaatgaacagcctgcgtgccgaggataccgcggtatattactgtgcgacagcggagacgttcttgggctatgactactggggtcagggaaccctggtcaccgtctcgagc

SEQ ID NO: 756 - DNA, 354 bp, Homo sapiens
ggggtgcagctgttggagtctgggggaggcttggtacagcctggggggtccctgcgtctctcctgtgcagcctccggattcatctttgcttggtatgatatggggtgggcccgccaggctccagggaagggtctagagtgggtctcaagtattgattggcatggtaatgttacatactacgcagactccgtgaagggccggttcaccatctcccgcgacaattccaagaacacgctgtatctgcaaatgaacagcctgcgtgccgaggataccgcggtatattactgtgcgacagcggaggagttggccggctatgactactggggtcagggaaccctggtcaccgtctcgagc

SEQ ID NO: 757 - DNA, 355 bp, Homo sapiens
  misc_feature 335: n = A,T,C or G
ggggtgcagctgttggagtctgggggaggcttggtacagcctggggggtccctgcgtctctcctgtgcagcctccggattcatctttgcttggtatgatatggggtgggcccgccaggctccagggaagggtctagagtgggtctcaagtattgattggcatggtaatgttacatactacgcagactccgtgaagggccggttcaccatctcccgcgacaattccaagaacacgctgtatctgcaaatgaacagcctgcgtgccgaggacaccgcggtatattactgtgcgacagcggagagggaggtggggtatgactactggggtcagggaanccctggtcaccgtctcgagc

SEQ ID NO: 758 - DNA, 354 bp, Homo sapiens
ggggtgcagctgttggagtctgggggaggcttggtacagcctggggggtccctgcgtctctcctgtgcagcctccggattcatctttgcttggtatgatatggggtgggcccgccaggctccagggaagggtctagagtgggtctcaagtattgattggcatggtaatgttacatactacgcagactccgtgaagggccggttcaccatctcccgcgacaattccaagaacacgctgtatctgcaaatgaacagcctgcgtgccgaggacaccgcggtatattactgtgcgacagcggagcagttggccgggtatgactactggggtcagggaaccctggtcaccgtctcgagc

SEQ ID NO: 759 - DNA, 354 bp, Homo sapiens
ggggtgcagctgttggagtctgggggaggcttggtacagcctggggggtccctgcgtctctcctgtgcagcctccggattcatctttgcttggtatgatatggggtgggcccgccaggctccagggaagggtctagagtgggtctcaagtattgattggcatggtaatgttacatactacgcagactccgtgaagggccggttcaccatctcccgcgacaattccaagaacacgctgtatctgcaaatgaacagcctgcgtgccgaggacaccgcggtatattactgtgcgacagcggagcacgacgagctctatgactactggggtcagggaaccctggtcaccgtctcgagc

SEQ ID NO: 760 - DNA, 354 bp, Homo sapiens
ggggtgcagctgttggagtctgggggaggcttggtacagcctggggggtccctgcgtctctcctgtgcagcctccggattcatctttgcttggtatgatatggggtgggcccgccaggctccagggaagggtctagagtgggtctcaagtattgattggcatggtaatgttacatactacgcagactccgtgaagggccggttcaccatctcccgcgacaattccaagaacacgctgtatctgcaaatgaacagcctgcgtgccgaggacaccgcggtatattactgtgcgacagcggagcgcacgcccacgtatgactactggggtcagggaaccctggtcaccgtctcgagc

SEQ ID NO: 761 - DNA, 355 bp, Homo sapiens
  misc_feature 349, 351: n = A,T,C or G
ggggtgcagctgttggagtctgggggaggcttggtacagcctggggggtccctgcgtctctcctgtgcagcctccggattcatctttgcttggtatgatatggggtgggcccgccaggctccagggaagggtctagagtgggtctcaagtattgattggcatggtaatgttacatactacgcagactccgtgaagggccggttcaccatctcccgcgacaattccaagaacacgctgtatctgcaaatgaacagcctgcgtgccgaggacaccgcggtatattactgtgcgacagcggaggccctcaaggggtatgactactggggtcagggaaccctggtcaccgttntngttg

SEQ ID NO: 762 - DNA, 354 bp, Homo sapiens
ggggtgcagctgttggagtctgggggaggcttggtacagcctggggggtccctgcgtctctcctgtgcagcctccggattcatctttgcttggtatgatatggggtgggcccgccaggctccagggaagggtctagagtgggtctcaagtattgattggcatggtaatgttacatactacgcagactccgtgaagggccggttcaccatctcccgcgacaattccaagaacacgctgtatctgcaaatgaacagcctgcgtgccgaggacaccgcggtatattactgtgcgacagcggagaccatctccgggtatgactactggggtcagggaaccctggtcaccgtctcgagc

SEQ ID NO: 763 - DNA, 355 bp, Homo sapiens
ggggtgcagctgttggagtctgggggaggcttggtacagcctggggggtccctgcgtctctcctgtgcagcctccggattcatctttgcttggtatgatatggggtgggcccgccaggctccagggaagggtctagagtgggtctcaagtattgattggcatggtaatgttacatactacgcagactccgtgaagggccggttcaccatctcccgcgacaattccaagaacacgctgtatctgcaaatgaacagcctgcgtgccgaggacaccgcggtatattactgtgcgacagcggagaacttccccggctatgactactggggtcagggaaccctggtcaccgtctcgagcg

SEQ ID NO: 764 - DNA, 354 bp, Homo sapiens
  misc_feature 181, 184: n = A,T,C or G
ggggtgcagctgttggagtctgggggaggcttggtacagcctggggggtccctgcgtctctcctgtgcagcctccggattcatcttttgggtgtatgacatggggtgggcccgccaggctccagggaagggtctggagtgggtctcaagtattgattggcatggtaatgttacatactacncanactccgtgaagggccggttcaccatctcccgcgacaattccaagaacacgctgtatctgcaaatgaacagcctgcgtgccgaggacaccgcggtatattactgtgcgacagcggagagggatgatacttatgactactggggtcagggaaccctggtcaccgtctcgagc

SEQ ID NO: 765 - DNA, 354 bp, Homo sapiens
  misc_feature 181, 184: n = A,T,C or G
ggggtgcagctgttggagtctgggggaggcttggtacagcctggggggtccctgcgtctctcctgtgcagcctccggattcatcttttggatctatgacatgggctgggcccgccaggctccagggaagggtctagagtgggtctcaagtattgattggcatggtaatgttacatactacncanactccgtgaagggccggttcaccatctcccgcgacaattccaagaacacgctgtatctgcaaatgaacagcctgcgtgccgaggacaccgcggtatattactgtgcgacagcggagagggatgatacttatgactactggggtcagggaaccctggtcaccgtctcgagc

SEQ ID NO: 766 - DNA, 355 bp, Homo sapiens
ggggtgcagctgttggagtctgggggaggcttggtacagcctggggggtccctgcgtctctcctgtgcagcctccggattcatctttgcttggtatgatatggggtgggcccgccaggctccagggaagggtctagagtgggtctcaagtattgattggcatggtaatgttacatactacgcagactccgtgaagggccggttcaccatctcccgcgacaattccaagaacacgctgtatctgcaaatgaacagcctgcgtgccgaggataccgcggtatattactgtgcgacagcggaggtggacaaggggtatgactactggggtcagggaaccctggtcaccgtctcgagct

SEQ ID NO: 767 - DNA, 355 bp, Homo sapiens
ggggtgcagctgttggagtctgggggaggcttggtacagcctggggggtccctgcgtctctcctgtgcagcctccggattcatctttgcttggtatgatatggggtgggcccgccaggctccagggaagggtctagagtgggtctcaagtattgattggcatggtaatgttacatactacgcagactccgtgaagggccggttcaccatctcccgcgacaattccaagaacacgctgtatctgcaaatgaacagcctgcgtgccgaggataccgcggtatattactgtgcgacagcggagtggctcccgtcctatgactactggggtcagggaaccctggtcaccgtctcgagcg

SEQ ID NO: 768 - DNA, 355 bp, Homo sapiens
ggggtgcagctgttggagtctgggggaggcttggtacagcctggggggtccctgcgtctctcctgtgcagcctccggattcatctttgcttggtatgatatggggtgggcccgccaggctccagggaagggtctagagtgggtctcaagtattgattggcatggtaatgttacatactacgcagactccgtgaagggccggttcaccatctcccgcgacaattccaagaacacgctgtatctgcaaatgaacagcctgcgtgccgaggataccgcggtatattactgtgcgacagcggagtccgaccccggctatgactactggggtcagggaaccctggtcaccgtctcgagcg

SEQ ID NO: 769 - DNA, 355 bp, Homo sapiens
ggggtgcggctgttggagtctgggggaggcttggtacagcctggggggtccctgcgtctctcctgtgcagcctccggattcatctttgcttggtatgatatggggtgggcccgccaggctccagggaagggtctagagtgggtctcaagtattgattggcatggtaatgttacatactacgcagactccgtgaagggccggttcaccatctcccgcgacaattccaagaacacgctgtatctgcaaatgaacagcctgcgtgccgaggacaccgcggtatattactgtgcgacagcggagaaggaggtcgggtatgactactggggtcagggaaccctggtcaccgttctcgagc

SEQ ID NO: 770 - DNA, 355 bp, Homo sapiens
ggggtgcagctgttggagtctgggggaggcttggtacagcctggggggtccctgcgtctctcctgtgcagcctccggattcatctttgcttggtatgatatggggtgggcccgccaggctccagggaagggtctagagtgggtctcaagtattgattggcatggtaatgttacatactacgcagactccgtgaagggccggttcaccatctcccgcgacaattccaagaacacgctgtatctgcaaatgaacagcctgcgtgccgaggacaccgcggtatattactgtgcgacagcggagcgggaccccggctatgactactggggtcagggaaccctggtcaccgtctcgagcg

SEQ ID NO: 771 - DNA, 355 bp, Homo sapiens
  misc_feature 227: n = A,T,C or G
ggggtgcagctgttggagtctgggggaggcttggtacagcctggggggtccctgcgtctctcctgtgcagcctccggattcatctttgcttggtatgatatggggtgggcccgccaggctccagggaagggtctagagtgggtctcaagtattgattggcatggtaatgttacatactacgcagactccgtgaagggccggttcaccatctcccgcgacaattccangaacacgctgtatctgcaaatgaacagcctgcgtgccgaggacaccgcggtatattactgtgcgacagcggagaaggtgcccacctatgactactggggtcagggaaccctggtcaccgtctcgagcg

SEQ ID NO: 772 - DNA, 354 bp, Homo sapiens
ggggtgcagctgttggagtctgggggaggcttggtacagcctggggggtccctgcgtctctcctgtgcagcctccggattcatctttgcttggtatgatatggggtgggcccgccaggctccagggaagggtctagagtgggtctcaagtattgattggcatggtaatgttacatactacgcagactccgtgaagggccggttcaccatctcccgcgacaattccaagaacacgctgtatctgcaaatgaacagcctgcgtgccgaggacaccgcggtatattactgtgcgacagcggagcgggtccccgggtatgactactggggtcagggaaccctggtcaccgtctcgagc

SEQ ID NO: 773 - DNA, 355 bp, Homo sapiens
ggggtgcagctgttggagtctgggggaggcttggtacagcctggggggtccctgcgtctctcctgtgcagcctccggattcatctttgcttggtatgatatggggtgggcccgccaggctccagggaagggtctagagtgggtctcaagtattgattggcatggtaatgttacatactacgcagactccgtgaagggccggttcaccatctcccgcgacaattccaagaacatgctgtatctgcaaatgaacagcctgcgtgccgaggacaccgcggtatattactgtgcgacagcggagaaggaccccggctatgactactggggtcagggaaccctggtcaccgtctcgagcg

SEQ ID NO: 774 - DNA, 354 bp, Homo sapiens
ggggtgcagctgttggagtctgggggaggcttggtacagcctggggggtccctgcgtctctcctgtgcagcctccggattcatctttgcttggtatgatatggggtgggcccgccaggctccagggaagggtctagagtgggtctcaagtattgattggcatggtaatgttacatactacgcagactccgtgaagggccggttcaccatctcccgcgacaattccaagaacacgctgtatctgcaaatgaacagcctgcgtgccgaggacaccgcggtatattactgtgcgacagcggagaaggagccggggtatgactactggggtcagggaaccctggtcaccgtctcgagc

SEQ ID NO: 775 - DNA, 355 bp, Homo sapiens
ggggtgcagctgttggagtctgggggaggcttggtacagcctggggggtccctgcgtctctcctgtgcagcctccggattcatctttgcttggtatgatatggggtgggcccgccaggctccagggaagggtctagagtgggtctcaagtattgattggcatggtaatgttacatactacgcagactccgtgaagggccggttcaccatctcccgcgacaattccaagaacacgctgtatctgcaaatgaacagcctgcgtgccgaggataccgcggtatattactgtgcgacagcggaggacgagcaggggtatgactactggggtcagggaaccctggtcaccgttctcgagc

SEQ ID NO: 776 - DNA, 355 bp, Homo sapiens
ggggtgcagctgttggagtctgggggaggcttggtacagcctggggggtccctgcgtctctcctgtgcagcctccggattcatctttgcttggtatgatatggggtgggcccgccaggccccagggaagggtctagagtgggtctcaagtattgattggcatggtaatgttacatactacgcagactccgtgaagggccggttcaccatctcccgcgacaattccaagaacacgctgtatctgcaaatgaacagcctgcgtgccgaggacaccgcggtatattactgtgcgacagcggagcgcgtgcccgggtatgactactggggtcagggaaccctggtcaccgtctcgagcg

SEQ ID NO: 777 - DNA, 354 bp, Homo sapiens
ggggtgcagctgttggagtctgggggaggcttggtacagcctggggggtccctgcgtctctcctgtgcagcctccggattcatcttttggatctatgacatggcctgggcccgccaggctccagggaagggtctggagtgggtctcaagtattgattggcatggtaatgttacatactacgcagactccgtgaagggccggttcaccatctcccgcgacaattccaagaacacgctgtatctgcaaatgaacagcctgcgtgccgaggacaccgcggtatattactgtgcgacagcggagagggatgatacttatgactactggggtcagggaaccctggtcaccgtctcgagc

SEQ ID NO: 778 - DNA, 354 bp, Homo sapiens
ggggtgcagctgttggagtctgggggaggcttggtacagcctggggggtccctgcgtctctcctgtgcagcctccggattcatctttatgtggtatgacatggggtgggcccgccaggctccagggaagggtctagagtgggtctcaagtattgattggcatggtaatgttacatactacgcagactccgtgaagggccggttcaccatctcccgcgacaattccaagaacacgctgtatctgcaaatgaacagcctgcgtgccgaggacaccgcggtatattactgtgcgacagcggagagggatgatacttatgactactggggtcagggaaccctggtcaccgtctcgagc

SEQ ID NO: 779 - DNA, 354 bp, Homo sapiens
ggggtgcagctgttggagtctgggggaggcttggtacagcctggggggtccctgcgtctctcctgtgcagcctccggattcatctttagctggtatgacatgaagtgggcccgccaggctccagggaagggtctagagtgggtctcaagtattgattggcatggtaatgttacatactacgcagactccgtgaagggccggttcaccatctcccgcgacaattccaagaacacgctgtatctgcaaatgaacagcctgcgtgccgaggacaccgcggtatattactgtgcgacagcggagagggatgatacttatgactactggggtcagggaaccctggtcaccgtctcgagc

SEQ ID NO: 780 - DNA, 355 bp, Homo sapiens
ggggtgcagctgttggagtctgggggaggcttggtacagcctggggggtccctgcgtctctcctgtgcagcctccggattcatctttgcttggtatgatatggggtgggcccgccaggctccagggaagggtctagagtgggtctcaagtattgattggcatggtaatgttacatactacgcagactccgtgaagggccggttcaccatctcccgcgacaattccaagaacacgctgtatctgcaaatgaacagcctgcgtgccgaggacaccgcggtatattactgtgcgacagcggaggccgagccggggtatgactactggggtcagggaaccctggtcaccgtctcgagcg

SEQ ID NO: 781 - DNA, 355 bp, Homo sapiens
ggggtgcagctgttggagtctgggggaggcttggtacagcctggggggtccctgcgtctctcctgtgcagcctccggattcatctttgcttggtatgatatggggtgggcccgccaggctccagggaagggtctagagtgggtctcaagtattgattggcatggtaatgttacatactacgcagactccgtgaagggccggttcaccatctcccgcgacaattccaagaacacgctgtatctgcaaatgaacagcctgcgtgccgaggacaccgcggtatattactgtgcgacagcggaggaggaggaggggtatgactactggggtcagggaaccctggtcaccgtctcgagcg

SEQ ID NO: 782 - DNA, 355 bp, Homo sapiens
ggggtgcagctgttggagtctgggggaggcttggtacagcctggggggtccctgcgtctctcctgtgcagcctccggattcatctttgcttggtatgatatggggtgggcccgccaggctccagggaagggtctagagtgggtctcaagtattgattggcatggtaatgttacatactacgcagactccgtgaagggccggttcaccatctcccgcgacaattccaagaacacgctgtatctgcaaatgaacagcctgcgtgccgaggataccgcggtatattactgtgcgacagcggaggacgacccggggtatgactactggggtcagggaaccctggtcaccgtctcgagcg

SEQ ID NO: 783 - DNA, 355 bp, Homo sapiens
ggggtgcagctgttggagtctgggggaggcttggtacagcctggggggtccctgcgtctctcctgtgcagcctccggattcatctttgcttggtatgatatggggtgggcccgccaggctccagggaagggtctagagtgggtctcaagtattgattggcatggtaatgttacatactacgcagactccgtgaagggccggttcaccatctcccgcgacaattccaagaacacgctgtatctgcaaatgaacagcctgcgtgccgaggacaccgcggtatattactgtgcgacagcggagtgggagcccgggtatgactactggggtcagggaaccctggtcaccattctcgagc

SEQ ID NO: 784 - DNA, 355 bp, Homo sapiens
ggggtgcagctgttggagtctgggggaggcttggtacagcctggggggtccctgcgtctctcctgtgcagcctccggattcatctttgcttggtatgatatggggtgggcccgccaggctccagggaagggtctagagtgggtctcaagtattgattggcatggtaatgttacatactacgcagactccgtgaagggccggttcaccatctcccgcgacaattccaagaacacgctgtatctgcaaatgaacagcctgcgtgccgaggacaccgcggtatattactgtgcgacagcggaggagatccccgggtatgactactggggtcagggaaccctggtcaccgttctcgagc

SEQ ID NO: 785 - DNA, 354 bp, Homo sapiens
ggggtgcagctgttggagtctgggggaggcttggtacagcctggggggtccctgcgtctctcctgtgcagcctccggattcatctttgcttggtatgatatggggtgggcccgccaggctccagggaagggtctagagtgggtctcaagtattgattggcatggtaatgttacatactacgcagactccgtgaagggccggttcaccatctcccgcgacaattccaagaacacgctgtatctgcaaatgaacagcctgcgtgccgaggacaccgcggtatattactgtgcgacagcggaggacgagccggggtatgactactggggtcagggaaccctggtcaccgtctcgagc

SEQ ID NO: 786 - DNA, 355 bp, Homo sapiens
ggggtgcagctgttggagtctgggggaggcttggtacagcctggggggtccctgcgtctctcctgtgcagcctccggattcatctttgcttggtatgatatggggtgggcccgccaggctccagggaagggtctagagtgggtctcaagtattgattggcatggtaatgttacatactacgtagactccgtgaagggccggttcaccatctcccgcgacaattccaagaacacgctgtatctgcaaatgaacagcctgcgtgccgaggacaccgcggtatattactgtgcgacagcggagaccgagccggggtatgactactggggtcagggaaccctggtcaccgtctcgagcg

SEQ ID NO: 787 - DNA, 355 bp, Homo sapiens
ggggtgcagctgttggagtctgggggaggcttggtacagcctggggggtccctgcgtctctcctgtgcagcctccggattcatctttgcttggtatgatatggggtgggcccgccaggctccagggaagggtctagagtgggtctcaagtattgattggcatggtaatgttacatactacgcagactccgtgaagggccggttcaccatctcccgcgacaattccaagaacacgctgtatctgcaaatgaacagcctgcgtgccgaggacaccgcggtatattactgtgcgacagcggagtcgatccccgggtatgactactggggtcagggaaccctggtcaccgtctcgagcg

SEQ ID NO: 788 - DNA, 354 bp, Homo sapiens
ggggtgcagctgttggagtctgggggaggcttggtacagcctggggggtccctgcgtctctcctgtgcagcctccggattcatctttgcttggtatgatatggggtgggcccgccaggctccagggaagggtctagagtgggtctcaagtattgattggcatggtaatgttacatactacgcagactccgtgaagggccggttcaccatctcccgcgacaattccaagaacacgctgtatctgcaaatgaacagcctgcgtgccgaggataccgcggtatattactgtgcgacagcggagagggagccggggtatgactactggggtcagggaaccctggtcaccgtctcgagc

SEQ ID NO: 789 - DNA, 354 bp, Homo sapiens
ggggtgcagctgttggagtctgggggaggcttggtacagcctggggggtccctgcgtctctcctgtgcagcctccggattcatctttgcttggtatgatatggggtgggcccgccaggctccagggaagggtctagagtgggtctcaagtattgattggcatggtaatgttacatactacgcagactccgtgaagggccggttcaccatctcccgcgacaattccaagaacacgctgtatctgcaaatgaacagcctgcgtgccgaggacaccgcggtatattactgtgcgacagcggagaaggaggagggctatgactactggggtcagggaaccctggtcaccgtctcgagc

SEQ ID NO: 790 - DNA, 354 bp, Homo sapiens
ggggtgcagctgttggagtctgggggaggcttggtacagcctggggggtccctgcgtctctcctgtgcagcctccggattcatctttgcttggtatgatatggggtgggcccgccaggctccagggaagggtctagagtgggtctcaagtattgattggcatggtaatgttacatactacgcagactccgtgaagggccggttcaccatctcccgcgacaattccaagaacacgctgtatctgcaaatgaacagcctgcgtgccgaggacaccgcggtatattactgtgcgacagcggagttggacgagggctatgactactggggtcagggaaccctggtcaccgtctcgagc

SEQ ID NO: 791 - DNA, 355 bp, Homo sapiens
ggggtgcagctgttggagtctgggggaggcttggtacagcctggggggtccctgcgtctctcctgtgcagcctccggattcatctttgcttggtatgatatggggtgggcccgccaggctccagggaagggtctagagtgggtctcaagtattgattggcatggtaatgttacatactacgcagactccgtgaagggccggttcaccatctcccgcgacaattccaagaacacgctgtatctgcaaatgaacagcctgcgtgccgaggataccgcggtatattactgtgcgacagcggagtggtggcccggctatgactactggggtcagggaaccctggtcaccgtctcgagca

SEQ ID NO: 792 - DNA, 354 bp, Homo sapiens
ggggtgcagctgttggagtctgggggaggcttggtacagcctggggggtccctgcgtctctcctgtgcagcctccggattcatctttgcttggtatgatatggggtgggcccgccaggctccagggaagggtctagagtgggtctcaagtattgattggcatggtaatgttacatactacgcagactccgtgaagggccggttcaccatctcccgcgacaattccaagaacacgctgtatctgcaaatgaacagcctgcgtgccgaggacaccgcggtatattactgtgcgacagcggagtcgtacaaggggtatgactactggggtcagggaaccctggtcaccgtctcgagc

SEQ ID NO: 793 - DNA, 355 bp, Homo sapiens
ggggtgcagctgttggagtctgggggaggcttggtacagcctggggggtccctgcgtctctcctgtgcagcctccggattcgtctttgcttggtatgatatggggtgggcccgccaggctccagggaagggtctagagtgggtctcaagtattgattggcacggtaatgttacatactacgcagactccgtgaagggccggttcaccatctcccgcgacaattccaagaacacgctgtatctgcaaatgaacagcctgcgtgccgaggacaccgcggtatattactgtgcgacagcggagttggacgaggggtatgactactggggtcagggaaccctggtcaccgtctcgagca

SEQ ID NO: 794 - DNA, 354 bp, Homo sapiens
ggggtgcagctgttggagtctgggggaggcttggtacagcctggggggtccctgcgtctctcctgtgcagcctccggattcatctttgcttggtatgatatggggtgggcccgccaggctccagggaagggtctagagtgggtctcaagtattgattggcatggtaatgttacatactacgcagactccgtgaagggccggttcaccatctcccgcgacaattccaagaacacgctgtatctgcaaatgaacagcctgcgtgccgaggacaccgcggtatattactgtgcgacagcggaggacacgcccgggtatgactactggggtcagggaaccctggtcaccgtctcgagc

SEQ ID NO: 795 - DNA, 355 bp, Homo sapiens
ggggtgcagctgttggagtctgggggaggcttggtacagcctggggggtccctgcgtctctcctgtgcagcctccggattcatctttgcttggtatgatatggggtgggcccgccaggctccagggaagggtctagagtgggtctcaagtattgattggcatggtaatgttacatactacgcagactccgtgaagggccggttcaccatctcccgcgacaattccaagaacacgctgtatctgcaaatgaacagcctgcgtgccgaggacaccgcggtatattactgtgcgacagcggaggaggagcccggctatgactactggggtcagggaaccctggtcaccgtctcgagca

SEQ ID NO: 796 - DNA, 356 bp, Homo sapiens
ggggtgcagctgttggagtctgggggaggcttggtacagcctggggggtccctgcgtctctcctgtgcagcctccggattcatctttgcttggtatgatatggggtgggcccgccaggctccagggaagggtctagagtgggtctcaagtattgattggcatggtaatgttacatactacgcagactccgtgaagggccggttcaccatctcccgcgacaattccaagaacacgctgtatctgcaaatgaacagcctgcgtgccgaggataccgcggtatattactgtgcgacagcggagaagacgcccgggtatgactactggggtcagggaaccctggtcaccgtctcgagcac

SEQ ID NO: 797 - DNA, 354 bp, Homo sapiens
gaggtgcagctgttggagtctgggggaggcttggtacagcctggggggtccctgcgtctctcctgtgcagcctccggattcatctttgcttggtatgatatggggtgggcccgccaggctccagggaagggtctagagtgggtctcaagtattgattggcatggtaatgttacatactacgcagactccgtgaagggccggttcaccatctcccgcgacaattccaagaacacgctgtatctgcaaatgaacagcctgcgtgccgaggacaccgcggtatattactgtgcgacagcggagaaggagccggggtatgactactggggtcagggaaccctggtcaccgtctcgagc

SEQ ID NO: 798 - DNA, 354 bp, Homo sapiens
ggggtgcagctgttggagtctgggggaggcttggtacagcctggggggtccctgcgtctctcctgtgcagcctccggattcatctttgcttggtatgatatggggtgggcccgccaggctccagggaagggtctagagtgggtctcaagtattgattggcatggtaatgttacatactacgcagactccgtgaagggccggttcaccatctcccgcgacaattccaagaacacgctgtatctgcaaatgaacagcctgcgtgccgaggacaccgcggtatattactgtgcgacatttgagagggatgatacttatgactactggggtcagggaaccctggtcaccgtctcgagc

SEQ ID NO: 799 - DNA, 354 bp, Homo sapiens
ggggtgcagctgttggagtctggggggggcttggtacagcctggggggtccctgcgtctctcctgtgcagcctccggattcatctttgcttggtatgatatggggtgggcccgccaggctccagggaagggtctagagtgggtctcaagtattgattggcatggtaatgttacatactacgcagactccgtgaagggccggttcaccatctcccgcgacaattccaagaacacgctgtatctgcaaatgaacagcctgcgtgccgaggacaccgcggtatattactgtgcgacaactgagagggatgatacttatgactactggggtcagggaaccctggtcaccgtctcgagc

SEQ ID NO: 800 - DNA, 354 bp, Homo sapiens
ggggtgcagctgttggagtctgggggaggcttggtacagcctggggggtccctgcgtctctcctgtgcagcctccggattcatctttgcttggtatgatatggggtgggcccgccaggctccagggaagggtctagagtgggtctcaagtattgattggcatggtaatgttacatactacgcagactccgtgaagggccggttcaccatctcccgcgacaattccaagaacacgctgtatctgcaaatgaacagcctgcgtgccgaggacaccgcggtatattactgtgcgacagaggagagggatgatacttatgactactggggtcagggaaccctggtcaccgtctcgagc

SEQ ID NO: 801 - DNA, 354 bp, Homo sapiens
ggggtgcagctgttggagtctgggggaggcttggtacagcctggggggtccctgcgtctctcctgtgcagcctccggattcatctttgcttggtatgatatggggtgggcccgccaggctccagggaagggtctagagtgggtctcaagtattgattggcatggtaatgttacatactacgcagactccgtgaagggccggttcaccatctcccgcgacaattccaagaacacgctgtatctgcaaatgaacagcctgcgtgccgaggacaccgcggtatattactgtgcgacatcggagagggatgatacttatgactactggggtcagggaaccctggtcaccgtctcgagc

SEQ ID NO: 802 - DNA, 354 bp, Homo sapiens
ggggtgcagctgttggagtctgggggaggcttggtacagcctggggggtccctgcgtctctcctgtgcagcctccggattcatctttgcttggtatgatatggggtgggcccgccaggctccagggaagggtctagagtgggtctcaagtattgattggcatggtaatgttacatactacgcagactccgtgaagggccggttcaccatctcccgcgacaattccaagaacacgctgtatctgcaaatgaacagcctgcgtgccgaggacaccgcggtatattactgtgcgacaattgagagggatgatacttatgactactggggtcagggaaccctggtcaccgtctcgagc

SEQ ID NO: 803 - DNA, 354 bp, Homo sapiens
ggggtgcagctgttggagtctgggggaggcttggtacagcctggggggtccctgcgtctctcctgtgcagcctccggattcatctttgcttggtatgatatggggtgggcccgccaggctccagggaagggtctagagtgggtctcaagtattgattggcatggtaatgttacatactacgcagactccgtgaagggccggttcaccatctcccgcgacaattccaagaacacgctgtatctgcaaatgaacagcctgcgtgccgaggacaccgcggtatattactgtgcgacagcgacgagggatgatacttatgactactggggtcagggaaccctggtcaccgtctcgagc

SEQ ID NO: 804 - DNA, 354 bp, Homo sapiens
ggggtgcagctgttggagtctgggggaggcttggtacagcctggggggtccctgcgtctctcctgtgcagcctccggattcatctttgcttggtatgatatggggtgggcccgccaggctccagggaagggtctagagtgggtctcaagtattgattggcatggtaatgttacatactacgcagactccgtgaagggccggttcaccatctcccgcgacaattccaagaacacgctgtatctgcaaatgaacagcctgcgtgccgaggacaccgcggtatattactgtgcgacagcggagagggatgagacttatgactactggggtcagggaaccctggtcaccgtctcgagc

SEQ ID NO: 805 - DNA, 354 bp, Homo sapiens
ggggtgcagctgttggagtctgggggaggcttggtacagcctggggggtccctgcgtctctcctgtgcagcctccggattcatctttgcttggtatgatgtggggtgggcccgccaggctccagggaagggtctagagtgggtttcaagtattgattggcatggtaatgttacatactacgcagactccgtgaagggccggttcaccatctcccgcgacaattccaagaacacgctgtatctgcaaatgaacagcctgcgtgccgaggataccgcggtatattactgtgcgacagcggagagggatgatatgtatgactactggggtcagggaaccctggtcaccgtctcgagc

SEQ ID NO: 806 - DNA, 354 bp, Homo sapiens
ggggtgcagctgttggagtctgggggaggcttggtacagcctggggggtccctgcgtctctcctgtgcagcctccggattcatctttgcttggtatgatatggggtgggcccgccaggctccagggaagggtctagagtgggtctcaagtattgattggcatggtaatgttacatactacgcagactccgtgaagggccggttcaccatctcccgcgacaattccaagaacacgctgtatctgcaaatgaacagcctgcgtgccgaggacaccgcggtatattactgtgcgacagcggagagggatgatacttatctgtactggggtcagggaaccctggtcaccgtctcgagc

SEQ ID NO: 807 - DNA, 355 bp, Homo sapiens
ggggtgcagctgttggagtctgggggaggcttggtacagcctggggggtccctgcgtctctcctgtgcagcctccggattcatctttgcttggtatgatatggggtgggcccgccaggctccagggaagggtctagagtgggtctcaagtattgattggcatggtaatgttacatactacgcagactccgtgaagggccggttcaccatctcccgcgacaattccaagaacacgctgtatctgcaaatgaacagcctgcgtgccgaggacaccgcggtatattactgtgcgacagcggaggtggagccggggtatgactactggggtcagggaaccctggtcaccgttctcgaga

SEQ ID NO: 808 - DNA, 355 bp, Homo sapiens
ggggtgcagctgttggagtctgggggaggcttggtacagcctggggggtccctgcgtctctcctgtgcagcctccggattcatctttgcttggtatgatatggggtgggcccgccaggctccagggaagggtctagagtgggtctcaagtattgattggcatggtaatgttacatactacgcagactccgtgaagggccggttcaccatctcccgcgacaattccaagaacacgctgtatctgcaaatgaacagcctgcgtgccgaggacaccgcggtatattactgtgcgacagcggagtcggagcccgggtatgactactggggtcagggaaccctggtcaccgttctcgagc

SEQ ID NO: 809 - DNA, 355 bp, Homo sapiens
ggggtgcagctgttggagtctgggggaggcttggtacagcctggggggtccctgcgtctctcctgtgcagcctccggattcatctttgcttggtatgatatggggtgggcccgccaggctccagggaagggtctagagtgggtctcaagtattgattggcatggtaatgttacatactacgcagactccgtgaagggccggttcaccatctcccgcgacaattccaagaacacgctgtatctgcaaatgaacagcctgcgtgccgaggacaccgcggtatattactgtgcgacagcggaggacttgccggggtatgactactggggtcagggaaccctggtcaccgtctcgagcg

SEQ ID NO: 810 - DNA, 355 bp, Homo sapiens
ggggtgcagctgttggagtctgggggaggcttggtacagcctggggggtccctgcgtctctcctgtgcagcctccggattcatctttgcttggtatgatatggggtgggcccgccaggctccagggaagggtctagagtgggtctcaagtattgattggcatggtaatgttacatactacgcagactccgtgaagggccggttcaccatctcccgcgacaattccaagaacacgctgtatctgcaaatgaacagcctgcgtgccgaggacaccgcggtatattactgtgcgacagcggagtcgctgccggggtatgactactggggtcagggaaccctggtcaccgtctcgagcg

SEQ ID NO: 811 - DNA, 355 bp, Homo sapiens
ggggtgcagctgttggagtctgggggaggcttggtacagcctggggggtccctgcgtctctcctgtgcagcctccggattcatctttgcttggtatgatatggggtgggcccgccaggctccagggaagggtctagagtgggtctcaagtattgattggcatggtaatgttacatactacgcagactccgtgaagggccggttcaccatctcccgcgacaattccaagaacacgctgtatctgcaaatgaacagcctgcgtgccgaggataccgcggtatattactgtgcgacagcggagtacgagccggggtatgactactggggtcagggaaccctggtcaccgtctcgagcg

SEQ ID NO: 812 - DNA, 355 bp, Homo sapiens
ggggtgcagctgttggagtctgggggaggcttggtacagcctggggggtccctgcgtctctcctgtgcagcctccggattcatctttgcttggtatgatatggggtgggcccgccaggctccagggaagggtctagagtgggtctcaagtattgattggcatggtaatgttacatactacgcagactccgtgaagggccggttcaccatctcccgcgacaattccaagaacacgctgtatctgcaaatgaacagcctgcgtgccgaggataccgcggtatattactgtgcgacagcggagcaggacccgggctatgactactggggtcagggaaccctggtcaccgtctcgagcg

SEQ ID NO: 813 - DNA, 355 bp, Homo sapiens
ggggtgcagctgttggagtctgggggaggcttggtacagcctggggggtccctgcgtctctcctgtgcagcctccggattcatctttgcttggtatgatatggggtgggcccgccaggctccagggaagggtctagagtgggtctcaagtattgattggcatggtaatgttacatactacgcagactccgtgaagggccggttcaccatctcccgcgacaattccaagaacacgctgtatctgcaaatgaacagcctgcgtgccgaggacaccgcggtatattactgtgcgacagcggagatggagccgggctatgactactggggtcagggaaccctggtcaccgttctcgagc

SEQ ID NO: 814 - DNA, 355 bp, Homo sapiens
ggggtgcagctgttggagtctgggggaggcttggtacagcctggggggtccctgcgtctctcctgtgcagcctccggattcatctttgcttggtatgatatggggtgggcccgccaggctccagggaagggtctagagtgggtctcaagtattgattggcatggtaatgttacatactacgcagactccgtgaagggccggttcaccatctcccgcgacaattccaagaacacgctgtatctgcaaatgaacagcctgcgtgccgaggacaccgcggtatattactgtgcgacagcggaggaggacccggggtatgactactggggtcagggaaccctggtcaccgtctcgagcg

SEQ ID NO: 815 - DNA, 355 bp, Homo sapiens
ggggtgcagctgttggagtctgggggaggcttggtacagcctggggggtccctgcgtctctcctgtgcagcctccggattcatctttgcttggtatgatatggggtgggcccgccaggctccagggaagggtctagagtgggtctcaagtattgattggcatggtaatgttacatactacgcagactccgtgaagggccggttcaccatctcccgcgacaattccaagaacacgctgtatctgcaaatgaacagcctgcgtgccgaggacaccgcggtatattactgtgcgacagcggagttcgtgccgggctatgactactggggtcagggaaccctggtcaccgtctcgagca

SEQ ID NO: 816 - DNA, 355 bp, Homo sapiens
ggggtgcagctgttggagtctgggggaggcttggtacagcctggggggtccctgcgtctctcctgtgcagcctccggattcatctttgcttggtatgatatggggtgggcccgccaggctccagggaagggtctagagtgggtctcagggattgattggcatggtaatgttacatactacgcagactccgtgaagggccggttcaccatctcccgcgacaattccaagaacacgctgtatctgcaaatgaacagcctgcgtgccgaggacaccgcggtatattactgtgcgacagcggaggacgagccggggtatgactactggggtcagggaaccctggtcaccgtctcgagcg

SEQ ID NO: 817 - DNA, 355 bp, Homo sapiens
ggggtgcagctgttggagtctgggggaggcttggtacagcctggggggtccctgcgtctctcctgtgcagcctccggattcatctttgcttggtatgatatggggtgggcccgccaggctccagggaagggtctagagtgggtctcatacattgattggcatggtaatgttacatactacgcagactccgtgaagggccggttcaccatctcccgcgacaattccaagaacacgctgtatctgcaaatgaacagcctgcgtgccgaggacaccgcggtatattactgtgcgacagcggaggacgagccggggtatgactactggggtcagggaaccctggtcaccgtctcgagcg

SEQ ID NO: 818 - DNA, 355 bp, Homo sapiens
ggggtgcagctgttggagtctgggggaggcttggtacagcctggggggtccctgcgtctctcctgtgcagcctccggattcatctttgcttggtatgatatggggtgggcccgccaggctccagggaagggtctagagtgggtctcaaagattgattggcatggtaatgttacatactacgcagactccgtgaagggccggttcaccatctcccgcgacaattccaagaacacgctgtatctgcaaatgaacagtctgcgtgccgaggacaccgcggtatattactgtgcgacagcggaggacgagccggggtatgactactggggtcagggaaccctggtcaccgtctcgagcg

SEQ ID NO: 819 - DNA, 355 bp, Homo sapiens
ggggtgcagctgttggagtctgggggaggcttggtacagcctggggggtccctgcgtctctcctgtgcagcctccggattcatctttgcttggtatgatatggggtgggcccgccaggctccagggaagggtctagagtgggtctcagtcattgattggcatggtaatgttacatactacgcagactccgtgaagggccggttcaccatctcccgcgacaattccaagaacacgctgtatctgcaaatgaacagcctgcgtgccgaggacaccgcggtatattactgtgcgacagcggaggacgagccggggtatgactactggggtcagggaaccctggtcaccgtctcgagcg

SEQ ID NO: 820 - DNA, 355 bp, Homo sapiens
ggggtgcagctgttggagtctgggggaggcttggtacagcctggggggtccctgcgtctctcctgtgcagcctccggattcatctttgcttggtatgatatggggtgggcccgccaggctccagggaagggtctagagtgggtctcaatcattgattggcatggtaatgttacatactacgcagactccgtgaagggccggttcaccatctcccgcgacaattccaagaacacgctgtatctgcaaatgaacagcctgcgtgccgaggacaccgcggtatattactgtgcgacagcggaggacgagccggggtatgactactggggtcagggaaccctggtcaccgtctcgagcg

SEQ ID NO: 821 - DNA, 355 bp, Homo sapiens
ggggtgcagctgttggagtctgggggaggcttggtacagcctggggggtccctgcgtctctcctgtgcagcctccggattcatctttgcttggtatgatatggggtgggcccgccaggctccagggaagggtctagagtgggtctcaaacattgattggcatggtaatgttacatactacgcagactccgtgaagggccggttcaccatctcccgcgacaattccaagaacacgctgtatctgcaaatgaacagcctgcgtgccgaggacaccgcggtatattactgtgcgacagcggaggacgagccggggtatgactactggggtcagggaaccctggtcaccgtctcgagcg

SEQ ID NO: 822 - DNA, 355 bp, Homo sapiens
ggggtgcagctgttggagtctgggggaggcttggtacagcctggggggtccctgcgtctctcctgtgcagcctccggattcatctttgcttggtatgatatggggtgggcccgccaggctccagggaagggtctagagtgggtctcatggattgattggcatggtaatgttacatactacgcagactccgtgaagggccggttcaccatctcccgcgacaattccaagaacacgctgtatctgcaaatgaacagcctgcgtgccgaggacaccgcggtatattactgtgcgacagcggaggacgagccggggtatgactactggggtcagggaaccctggtcaccgtctcgagcg

SEQ ID NO: 823 - DNA, 355 bp, Homo sapiens
ggggtgcagctgttggagtctgggggaggcttggtacagcctggggggtccctgcgtctctcctgtgcagcctccggattcatctttgcttggtatgatatggggtgggcccgccaggctccagggaagggtctagagtgggtctcaagaattgattggcatggtaatgttacatactacgcagactccgtgaagggccggttcaccatctcccgcgacaattccaagaacacgctgtatctgcaaatgaacagcctgcgtgccgaggacaccgcggtatattactgtgcgacagcggaggacgagccggggtatgactactggggtcagggaaccctggtcaccgtctcgagcg

SEQ ID NO: 824 - DNA, 355 bp, Homo sapiens
ggggtgcagctgttggagtctgggggaggcttggtacagcctggggggtccctgcgtctctcctgtgcagcctccggattcatctttgcttggtatgatatggggtgggcccgccaggctccagggaagggtctagagtgggtctcaagtattccgtggcatggtaatgttacatactacgcagactccgtgaagggccggttcaccatctcccgcgacaattccaagaacacgctgtatctgcaaatgaacagcctgcgtgccgaggacaccgcggtatattactgtgcgacagcggaggacgagccggggtatgactactggggtcagggaaccctggtcaccgtctcgagcg

SEQ ID NO: 825 - DNA, 355 bp, Homo sapiens
ggggtgcagctgttggagtctgggggaggcttggtacagcctggggggtccctgcgtctctcctgtgcagcctccggattcatctttgcttggtatgatatggggtgggcccgccaggctccagggaagggtctagagtgggtctcaagtatttggtggcatggtaatgttacatactacgcagactccgtgaagggccggttcaccatctcccgcgacaattccaagaacacgctgtatctgcaaatgaacagcctgcgtgccgaggacaccgcggtatattactgtgcgacagcggaggacgagccggggtatgactactggggtcagggaaccctggtcaccgtctcgagcg

SEQ ID NO: 826 - DNA, 355 bp, Homo sapiens
ggggtgcagctgttggagtctgggggaggcttggtacagcctggggggtccctgcgtctctcctgtgcagcctccggattcatctttgcttggtatgatatggggtgggcccgccaggctccagggaagggtctagagtgggtctcaagtattgtgtggcatggtaatgttacatactacgcagactccgtgaagggccggttcaccatctcccgcgacaattccaagaacacgctgtatctgcaaatgaacagcctgcgtgccgaggacaccgcggtatattactgtgcgacagcggaggacgagccggggtatgactactggggtcagggaaccctggtcaccgtctcgagcg

SEQ ID NO: 827 - DNA, 355 bp, Homo sapiens
ggggtgcagctgttggagtctgggggaggcttggtacagcctggggggtccctgcgtctctcctgtgcagcctccggattcatctttgcttggtatgatatggggtgggcccgccaggctccagggaagggtctagagtgggtctcaagtattatctggcatggtaatgttacatactacgcagactccgtgaagggccggttcaccatctcccgcgacaattccaagaacacgctgtatctgcaaatgaacagcctgcgtgccgaggacaccgcggtatattactgtgcgacagcggaggacgagccggggtatgactactggggtcagggaaccctggtcaccgtctcgagcg

SEQ ID NO: 828 - DNA, 355 bp, Homo sapiens
  misc_feature 249, 285, 318, 351, 355: n = A,T,C or G
ggggtgcagctgttggagtctgggggaggcttggtacagcctggggggtccctgcgtctctcctgtgcagcctccggattcatctttgcttggtatgatatggggtgggcccgccaggctccagggaagggtctagagtgggtctcaagtattcagtggcatggtaatgttacatactacgcagactccgtgaagggccggttcaccatctcccgcgacaattccaagaacacgctgtatctgcaaatnaacagcctgcgtgccgaggacaccccggtatattantgtgcgacagcggaggacgagccggggtatgantactggggtcagggaaccctggtcaccgttctngagn

SEQ ID NO: 829 - DNA, 355 bp, Homo sapiens
ggggtgcagctgttggagtctgggggaggcttggtacagcctggggggtccctgcgtctctcctgtgcagcctccggattcatctttgcttggtatgatatggggtgggcccgccaggctccagggaagggtctagagtgggtctcaagtattacgtggcatggtaatgttacatactacgcagactccgtgaagggccggttcaccatctcccgcgacaattccaagaacacgctgtatctgcaaatgaacagcctgcgtgccgaggacaccgcggtatattactgtgcgacagcggaggacgagccggggtatgactactggggtcagggaaccctggtcaccgtctcgagcg

SEQ ID NO: 830 - DNA, 355 bp, Homo sapiens
ggggtgcagctgttggagtctgggggaggcttggtacagcctggggggtccctgcgtctctcctgtgcagcctccggattcatctttgcttggtatgatatggggtgggcccgccaggctccagggaagggtctagagtgggtctcaagtattgagtggcatggtaatgttacatactacgcagactccgtgaagggccggttcaccatctcccgcgacaattccaagaacacgctgtatctgcaaatgaacagcctgcgtgccgaggacaccgcggtatattactgtgcgacagcggaggacgagccggggtatgactactggggtcagggaaccctggtcaccgtctcgagcg

SEQ ID NO: 831 - DNA, 355 bp, Homo sapiens
ggggtgcagctgttggagtctgggggaggcttggtacagcctggggggtccctgcgtctctcctgtgcagcctccggattcatctttgcttggtatgatatggggtgggcccgccaggctccagggaagggtctagagtgggtctcaagtattaggtggcatggtaatgttacatactacgcagactccgtgaagggccggttcaccatctcccgcgacaattccaagaacacgctgtatctgcaaatgaacagcctgcgtgccgaggacaccgcggtatattactgtgcgacagcggaggacgagccggggtatgactactggggtcagggaaccctggtcaccgtctcgagcg

SEQ ID NO: 832 - DNA, 355 bp, Homo sapiens
ggggtgcagctgttggagtctgggggaggcttggtacagcctggggggtccctgcgtctctcctgtgcagcctccggattcatctttgcttggtatgatatggggtgggcccgccaggctccagggaagggtctagagtgggtctcaagtattgcctggcatggtaatgttacatactacgcagactccgtgaagggccggttcaccatctcccgcgacaattccaagaacacgctgtatctgcaaatgaacagcctgcgtgccgaggacaccgcggtatattactgtgcgacagcggaggacgagccggggtatgactactggggtcagggaaccctggtcaccgtctcgagcg

SEQ ID NO: 833 - DNA, 355 bp, Homo sapiens
ggggtgcagctgttggagtctgggggaggcttggtacagcctggggggtccctgcgtctctcctgtgcagcctccggattcatctttgcttggtatgatatggggtgggcccgccaggctccagggaagggtctagagtgggtctcaagtattttctggcatggtaatgttacatactacgcagactccgtgaagggccggttcaccatctcccgcgacaattccaagaacacgctgtatctgcaaatgaacagcctgcgtgccgaggacaccgcggtatattactgtgcgacagcggaggacgagccggggtatgactactggggtcagggaaccctggtcaccgtctcgagcg

SEQ ID NO: 834 - DNA, 354 bp, Homo sapiens
ggggtgcagctgttggagtctgggggaggcttggtacagcctggggggtccctgcgtctctcctgtgcagcctccggattcatctttgcttggtatgatatggggtgggcccgccaggctccagggaagggtctagagtgggtctcaagtattgattggttgggtaatgttacatactacgcagactccgtgaagggccggttcaccatctcccgcgacaattccaagaacacgctgtatctgcaaatgaacagcctgcgtgccgaggacaccgcggtatattactgtgcgacagcggaggacgagccggggtatgactactggggtcagggaaccctggtcaccgtctcgagc

SEQ ID NO: 835 - DNA, 354 bp, Homo sapiens
ggggtgcagctgttggagtctgggggaggcttggtacagcctggggggtccctgcgtctctcctgtgcagcctccggattcatctttgcttggtatgatatggggtgggcccgccaggctccagggaagggtctagagtgggtctcaagtattgattggatgggtaatgttacatactacgcagactccgtgaagggccggttcaccatctcccgcgacaattccaagaacacgctgtatctgcaaatgaacagcctgcgtgccgaggacaccgcggtatattactgtgcgacagcggaggacgagccggggtatgactactggggtcagggaaccctggtcaccgtctcgagc

SEQ ID NO: 836 - DNA, 354 bp, Homo sapiens
ggggtgcagctgttggagtctgggggaggcttggtacagcctggggggtccctgcgtctctcctgtgcagcctccggattcatctttgcttggtatgatatggggtgggcccgccaggctccagggaagggtctagagtgggtctcaagtattgattggaggggtaatgttacatactacgcagactccgtgaagggccggttcaccatctcccgcgacaattccaagaacacgctgtatctgcaaatgaacagcctgcgtgccgaggacaccgcggtatattactgtgcgacagcggaggacgagccggggtatgactactggggtcagggaaccctggtcaccgtctcgagc

SEQ ID NO: 837 - DNA, 354 bp, Homo sapiens
ggggtgcagctgttggagtctgggggaggcttggtacagcctggggggtccctgcgtctctcctgtgcagcctccggattcatctttgcttggtatgatatggggtgggcccgccaggctccagggaagggtctagagtgggtctcaagtattgattggtggggtaatgttacatactacgcagactccgtgaagggccggttcaccatctcccgcgacaattccaagaacacgctgtatctgcaaatgaacagcctgcgtgccgaggacaccgcggtatattactgtgcgacagcggaggacgagccggggtatgactactggggtcagggaaccctggtcaccgtctcgagc

SEQ ID NO: 838 - DNA, 354 bp, Homo sapiens
ggggtgcagctgttggagtctgggggaggcttggtacagcctggggggtccctgcgtctctcctgtgcagcctccggattcatctttgcttggtatgatatggggtgggcccgccaggctccagggcagggtctagagtgggtctcaagtattgattgggacggtaatgttacatactacgcagactccgtgaagggccggttcaccatctcccgcgacaattccaagaacacgctgtatctgcaaatgaacagcctgcgtgccgaggacaccgcggtatattactgtgcgacagcggaggacgagccggggtatgactactggggtcagggaaccctggtcaccgtctcgagc

SEQ ID NO: 839 - DNA, 354 bp, Homo sapiens
ggggtgcagctgttggagtctgggggaggcttggtacagcctggggggtccctgcgtctctcctgtgcagcctccggattcatctttgcttggtatgatatggggtgggcccgccaggccccagggaagggtctagagtgggtctcaagtattgattggtccggtaatgttacatactacgcagactccgtgaagggccggttcaccatctcccgcgacaattccaagaacacgctgtatctgcaaatgaacagcctgcgtgccgaggacaccgcggtatattactgtgcgacagcggaggacgagccggggtatgactactggggtcagggaaccctggtcaccgtctcgagc

SEQ ID NO: 840 - DNA, 354 bp, Homo sapiens
ggggtgcagctgttggagtctgggggaggcttggtacagcctggggggtccctgcgtctctcctgtgcagcctccggattcatctttgcttggtatgatatggggtgggcccgccaggctccagggaagggtctagagtgggtctcaagtattgattgggcgggtaatgttacatactacgcagactccgtgaagggccggttcaccatctcccgcgacaattccaagaacacgctgtatctgcaaatgaacagcctgcgtgccgaggacaccgcggtatattactgtgcgacagcggaggacgagccggggtatgactactggggtcagggaaccctggtcaccgtctcgagc

SEQ ID NO: 841 - DNA, 354 bp, Homo sapiens
ggggtgcagctgttggagtctgggggaggcttggtacagcctggggggtccctgcgtctctcctgtgcagcctccggattcatctttgcttggtatgatatggggtgggcccgccaggctccagggaagggtctagagtgggtctcaagtattgattggccaggtaatgttacatactacgcagactccgtgaagggccggttcaccatctcccgcgacaattccaagaacacgctgtatctgcaaatgaacagcctgcgtgccgaggacaccgcggtatattactgtgcgacagcggaggacgagccggggtatgactactggggtcagggaaccctggtcaccgtctcgagc

SEQ ID NO: 842 - DNA, 354 bp, Homo sapiens
ggggtgcagctgttggagtctgggggaggcttggtacagcctggggggtccctgcgtctctcctgtgcagcctccggattcatctttgcttggtatgatatggggtgggcccgccaggctccagggaagggtctagagtgggtctcaagtattgattgggtgggtaatgttacatactacgcagactccgtgaagggccggttcaccatctcccgcgacaattccaagaacacgctgtatctgcaaatgaacagcctgcgtgccgaggacaccgcggtatattactgtgcgacagcggaggacgagccggggtatgactactggggtcagggaaccctggtcaccgtctcgagc

SEQ ID NO: 843 - DNA, 354 bp, Homo sapiens
ggggtgcagctgttggagtctgggggaggcttggtacagcctggggggtccctgcgtctctcctgtgcagcctccggattcatctttgcttggtatgatatggggtgggcccgccaggctccagggaagggtctagagtgggtctcgagtattgattggacgggtaatgttacatactacgcagactccgtgaagggccggttcaccatctcccgcgacaattccaagaacacgctgtatctgcaaatgaacagcctgcgtgccgaggacaccgcggtatattactgtgcgacagcggaggacgagccggggtatgactactggggtcagggaaccctggtcaccgtctcgagc

SEQ ID NO: 844 - DNA, 354 bp, Homo sapiens
ggggtgcagctgttggagtctgggggaggcttggtacagcctggggggtccctgcgtctctcctgtgcagcctccggattcatctttgcttggtatgatatggggtgggcccgccaggctccagggaagggtctagagtgggtctcaagtattgattgggggggtaatgttacatactacgcagactccgtgaagggccggttcaccatctcccgcgacaattccaagaacacgctgtatctgcaaatgaacagcctgcgtgccgaggacaccgcggtatattactgtgcgacagcggaggacgagccggggtatgactactggggtcagggaaccctggtcaccgtctcgagc

SEQ ID NO: 845 - DNA, 354 bp, Homo sapiens
ggggtgcagctgttggagtctgggggaggcttggtacagcctggggggtccctgcgtctctcctgtgcagcctccggattcatctttgcttggtatgatatggggtgggcccgccaggctccagggaagggtctggagtgggtctcaagtattgattggtacggtaatgttacatactacgcagactccgtgaagggccggttcaccatctcccgcgacaattccaagaacacgctgtatctgcaaatgaacagcctgcgtgccgaggacaccgcggtatattactgtgcgacagcggaggacgagccggggtatgactactggggtcagggaaccctggtcaccgtctcgagc

SEQ ID NO: 846 - DNA, 354 bp, Homo sapiens
ggggtgcagctgttggagtctgggggaggcttggtacagcctggggggtccctgcgtctctcctgtgcagcctccggattcatctttgcttggtatgatatggggtgggcccgccaggctccagggaagggtctagagtgggtctcaagtattgattggaacggtaatgttacatactacgcagactccgtgaagggccggttcaccatctcccgcgacaattccaagaacacgctgtatctgcaaatgaacagcctgcgtgccgaggacaccgcggtatattactgtgcgacagcggaggacgagccggggtatgactactggggtcagggaaccctggtcaccgtctcgagc

SEQ ID NO: 847 - DNA, 354 bp, Homo sapiens
ggggtgcagctgttggagtctgggggaggcttggtacagcctggggggtccctgcgtctctcctgtgcagcctccggattcatctttgcttggtatgatatggggtgggcccgccaggctccagggaagggtctagagtgggtctcaagtattgattggcatggtaatgggacatactacgcagactccgtgaagggccggttcaccatctcccgcgacaattccaagaacacgctgtatctgcaaatgaacagcctgcgtgccgaggacaccgcggtatattactgtgcgacagcggaggacgagccggggtatgactactggggtcagggaaccctggtcaccgtctcgagc

SEQ ID NO: 848 - DNA, 354 bp, Homo sapiens
ggggtgcagctgttggagtctgggggaggcttggtacagcctggggggtccctgcgtctctcctgtgcagcctccggattcatctttgcttggtatgatatggggtgggcccgccaggctccagggaagggtctagagtgggtctcaagtattgattggcatggtaatctcacatactacgcagactccgtgaagggccggttcaccatctcccgcgacaattccaagaacacgctgtatctgcaaatgaacagcctgcgtgccgaggacaccgcggtatattactgtgcgacagcggaggacgagccggggtatgactactggggtcagggaaccctggtcaccgtctcgagc

SEQ ID NO: 849 - DNA, 354 bp, Homo sapiens
ggggtgcagctgttggagtctgggggaggcttggtacagcctggggggtccctgcgtctctcctgtgcagcctccggattcatctttgcttggtatgatatggggtgggcccgccaggctccagggaagggtctagagtgggtctcaagtattgattggcatggtaatatgacatactacgcagactccgtgaagggccggttcaccatctcccgcgacaattccaagaacacgctgtatctgcaaatgaacagcctgcgtgccgaggacaccgcggtatattactgtgcgacagcggaggacgagccggggtatgactactggggtcagggaaccctggtcaccgtctcgagc

SEQ ID NO: 850 - DNA, 354 bp, Homo sapiens
ggggtgcagctgttggagtctgggggaggcttggtacagcctggggggtccctgcgtctctcctgtgcagcctccggattcatctttgcttggtatgatatggggtgggcccgccaggctccagggaagggtctagagtgggtctcaagtattgattggcatggtaataggacatactacgcagactccgtgaagggccggttcaccatctcccgcgacaattccaagaacacgctgtatctgcaaatgaacagcctgcgtgccgaggacaccgcggtatattactgtgcgacagcggaggacgagccggggtatgactactggggtcagggaaccctggtcaccgtctcgagc

SEQ ID NO: 851 - DNA, 354 bp, Homo sapiens
ggggtgcagctgttggagtctgggggaggcttggtacagcctggggggtccctgcgtctctcctgtgcagcctccggattcatctttgcttggtatgatatggggtgggcccgccaggctccagggaagggtctagagtgggtctcaagtattgattggcatggtaattacacatactacgcagactccgtgaagggccggttcaccatctcccgcgacaattccaagaacacgctgtatctgcaaatgaacagcctgcgtgccgaggacaccgcggtatattactgtgcgacagcggaggacgagccggggtatgactactggggtcagggaaccctggtcaccgtctcgagc

SEQ ID NO: 852 - DNA, 354 bp, Homo sapiens
ggggtgcagctgttggagtctgggggaggcttggtacagcctggggggtccctgcgtctctcctgtgcagcctccggattcatctttgcttggtatgatatggggtgggcccgccaggctccagggaagggtctagagtgggtctcaagtattgattggcatggtaatttcacatactacgcagactccgtgaagggccggttcaccatctcccgcgacaattccaagaacacgctgtatctgcaaatgaacagcctgtgtgccgaggacaccgcggtatattactgtgcgacagcggaggacgagccggggtatgactactggggtcagggaaccctggtcaccgtctcgagc

SEQ ID NO: 853 - DNA, 354 bp, Homo sapiens
ggggtgcagctgttggagtctgggggaggcttggtacagcctggggggtccctgcgtctctcctgtgcagcctccggactcatctttgcttggtatgatatggggtgggcccgccaggctccagggaagggtctggagtgggtctcaagtattgattggcatggtaataagacatactacgcagactccgtgaagggccggttcaccatctcccgcgacaattccaagaacacgctgtatctgcaaatgaacagcctgcgtgccgaggacaccgcggtatattactgtgcgacagcggaggacgagccggggtatgactactggggtcagggaaccctggtcaccgtctcgagc

SEQ ID NO: 854 - DNA, 354 bp, Homo sapiens
ggggtgcagctgttggagtctgggggaggcttggtacagcctggggggtccctgcgtctctcctgtgcagcctccggattcatctttgcttggtatgatatggggtgggcccgccaggctccagggaagggtctagagtgggtctcaagtattgattggcatggtaattcgacatactacgcagactccgtgaagggccggttcaccatctcccgcgacaattccaagaacacgctgtatctgcaaatgaacagcctgcgtgccgaggacaccgcggtatattactgtgcgacagcggaggacgagccggggtatgactactggggtcaggggaccctggtcaccgtctcgagc

SEQ ID NO: 855 - DNA, 354 bp, Homo sapiens
ggggtgcagctgttggagtctgggggaggcttggtacagcctggggggtccctgcgtctctcctgtgcagcctccggattcatctttgcttggtatgatatggggtgggcccgccaggctccagggaagggtctagagtgggtctcaagtattgattggcatggtaatgccacatactacgcagactccgtgaagggccggttcaccatctcccgcgacaattccaagaacacgctgtatctgcaaatgaacagcctgcgtgccgaggacaccgcggtatattactgtgcgacagcggaggacgagccggggtatgactactggggtcagggaaccctggtcaccgtctcgagc

SEQ ID NO: 856 - DNA, 354 bp, Homo sapiens
ggggtgcagctgttggagtctgggggaggcttggtacagcctggggggtccctgcgtctctcctgtgcagcctccggattcatctttgcttggtatgatatggggtgggcccgccaggctccagggaagggtctagagtgggtctcaagtattgattggcatggtaatacgacatactacgcagactccgtgaagggccggttcaccatctcccgcgacaattccaagaacacgctgtatctgcaaatgaacagcctgcgtgccgaggacaccgcggtatattactgtgcgacagcggaggacgagccggggtatgactactggggtcagggaaccctggtcaccgtctcgagc

SEQ ID NO: 857 - DNA, 354 bp, Homo sapiens
ggggtgcagctgttggagtctgggggaggcttggtacagcctggggggtccctgcgtctctcctgtgcagcctccggattcatctttgcttggtatgatatggggtgggcccgccaggctccagggaagggtctagagtgggtctcaagtattgattggcatggtaataacacatactacgcagactccgtgaagggccggttcaccatctcccgcgacaattccaagaacacgctgtatctgcaaatgaacagcctgcgtgccgaggacaccgcggtatattactgtgcgacagcggaggacgagccggggtatgactactggggtcagggaaccctggtcaccgtctcgagc

SEQ ID NO: 858 - DNA, 354 bp, Homo sapiens
ggggtgcagctgttggagtctgggggaggcttggtacagcctggggggtccctgcgtctctcctgtgcagcctccggattcatctttgcttggtatgatatggggtgggcccgccaggctccagggaagggtctagagtgggtctcaagtattgattggcatggtaattggacatactacgcagactccgtgaagggccggttcaccatctcccgcgacaattccaagaacacgctgtatctgcaaatgaacagcctgcgtgccgaggacaccgcggtatattactgtgcgacagcggaggacgagccggggtatgactactggggtcagggaaccctggtcaccgtctcgagc

SEQ ID NO: 859 - DNA, 355 bp, Homo sapiens
ggggtgcagctgttggagtctgggggaggcttggtacagcctggggggtccctgcgtctctcctgtgcagcctccggattcatctttgcttggtatgatatggggtgggcccgccaggctccagggaagggtctagagtgggtctcaagtattgattggcatggttcggttacatactacgcagactccgtgaagggccggttcaccatctcccgcgacaattccaagaacacgctgtatctgcaaatgaacagcctgcgtgccgaggacaccgcggtatattactgtgcgacagcggaggacgagccggggtatgactactggggtcagggaaccctggtcaccgtctcgagcg

SEQ ID NO: 860 - DNA, 355 bp, Homo sapiens
ggggtgcagctgttggagtctgggggaggcttggtacagcctggggggtccctgcgtctctcctgtgcagcctccggattcatctttgcttggtatgatatggggtgggcccgccaggctccagggaagggtctagagtgggtctcaagtattgattggcatggtcaggttacatactacgcagactccgtgaagggccggttcaccatctcccgcgacaattccaagaacacgctgtatctgcaaatgaacagcctgcgtgccgaggacaccgcggtatattactgtgcgacagcggaggacgagccggggtatgactactggggtcagggaaccctggtcaccgtctcgagcg

SEQ ID NO: 861 - DNA, 355 bp, Homo sapiens
ggggtgcagctgttggagtctgggggaggcttggtacagcctggggggtccctgcgtctctcctgtgcagcctccggattcatctttgcttggtatgatatggggtgggtccgccaggctccagggaagggtctagagtgggtctcaagtattgattggcatggtctggttacatactacgcagactccgtgaagggccggttcaccatctcccgcgacaattccaagaacacgctgtatctgcaaatgaacagcctgcgtgccgaggacaccgcggtatattactgtgcgacagcggaggacgagccggggtatgactactggggtcagggaaccctggtcaccgtctcgagcg

SEQ ID NO: 862 - DNA, 355 bp, Homo sapiens
ggggtgcagctgttggagtctgggggaggcttggtacagcctggggggtccctgcgtctctcctgtgcagcctccggattcatctttgcttggtatgatatggggtgggcccgccaggctccagggaagggtctagagtgggtctcaagtattgattggcatggtaaggttacatactacgcagactccgtgaagggccggttcaccatctcccgcgacaattccaagaacacgctgtatctgcaaatgaacagcctgcgtgccgaggacaccgcggtatattactgtgcgacagcggaggacgagccggggtatgactactggggtcagggaaccctggtcaccgtctcgagcg

SEQ ID NO: 863 - DNA, 355 bp, Homo sapiens
ggggtgcagctgttggagtctgggggaggcttggtacagcctggggggtccctgcgtctctcctgtgcagcctccggattcatctttgcttggtatgatatggggtgggcccgccaggctccagggaagggtctagagtgggtctcaagtattgattggcatggttgggttacatactacgcagactccgtgaaaggccggttcaccatctcccgcgacaattccaagaacacgctgtatctgcaaatgaacagcctgcgtgccgaggacaccgcggtatattactgtgcgacagcggaggacgagccggggtatgactactggggtcagggaaccctggtcaccgtctcgagcg

SEQ ID NO: 864 - DNA, 355 bp, Homo sapiens
ggggtgcagctgttggagtctgggggaggcttggtacagcctggggggtccctgcgtctctcctgtgcagcctccggattcatctttgcttggtatgatatggggtgggcccgccaggctccagggaagggtctagagtgggtctcaagtattgattggcatggtggggttacatactacgcagactccgtgaagggccggttcaccatctcccgcgacaattccaagaacacgctgtatctgcaaatgaacagcctgcgtgccgaggacaccgcggtatattactgtgcgacagcggaggacgagccggggtatgactactggggtcagggaaccctggtcaccgtctcgagcg

SEQ ID NO: 865 - DNA, 355 bp, Homo sapiens
ggggtgcagctgttggagtctgggggaggcttggtacagcctggggggtccctgcgtctctcctgtgcagcctccggattcatctttgcttggtatgatatggggtgggcccgccaggctccagggaagggtctagagtgggtctcaagtattgattggcatggtcacgttacatactacgcagactccgtgaagggccggttcaccatctcccgcgacaattccaagaacacgctgtatctgcaaatgaacagcctgcgtgccgaggacaccgcggtatattactgtgcgacagcggaggacgagccggggtatgactactggggtcagggaaccctggtcaccgtctcgagcg

SEQ ID NO: 866 - DNA, 355 bp, Homo sapiens
ggggtgcagctgttggagtctgggggaggcttggtacagcctggggggtccctgcgtctctcctgtgcagcctccggattcatctttgcttggtatgatatggggtgggcccgccaggctccagggaagggtctagagtgggtctcaagtattgattggcatggtgaggttacatactacgcagactccgtgaagggccggttcaccatctcccgcgacaattccaagaacacgctgtatctgcaaatgaacagcctgcgtgccgaggacaccgcggtatattactgtgcgacagcggaggacgagccggggtatgactactggggccagggaaccctggtcaccgtctcgagcg

SEQ ID NO: 867 - DNA, 355 bp, Homo sapiens
ggggtgcagctgttggagtctgggggaggcttggtacagcctggggggtccctgcgtctctcctgtgcagcctccggattcatctttgcttggtatgatatggggtgggcccgccaggctccagggaagggtctagagtgggtctcaagtattgattggcatggtagggttacatactacgcagactccgtgaagggccggttcaccatctcccgcgacaattccaagaacacgctgtatctgcaaatgaacagcctgcgtgccgaggacaccgcggtatattactgtgcgacagcggaggacgagccggggtatgactactggggtcagggaaccctggtcaccgtactcgagc

SEQ ID NO: 868 - DNA, 355 bp, Homo sapiens
ggggtgcagctgttggagtctgggggaggcttggtacagcctggggggtccctgcgtctctcctgtgcagcctccggattcatctttgcttggtatgatatggggtgggcccgccaggctccagggaagggtctagagtgggtctcaagtattgattggcatggtgtcgttacatactacgcagactccgtgaagggccggttcaccatctcccgcgacaattccaagaacacgctgtatctgcaaatgaacagcctgcgtgccgaggacaccgcggtatattactgtgcgacagcggaggacgagccggggtatgactactggggtcagggaaccctggtcaccgtctcgagcg

SEQ ID NO: 869 - DNA, 355 bp, Homo sapiens
ggggtgcagctgttggagtctgggggaggcttggtacagcctggggggtccctgcgtctctcctgtgcagcctccggattcatctttgcttggtatgatatggggtgggcccgccaggctccagggaagggtctagagtgggtctcaagtattgattggcatggttgcgttacatactacgcagactccgtgaagggccggttcaccatctcccgcgacaattccaagaacacgctgtatctgcaaatgaacagcctgcgtgccgaggacaccgcggtatattactgtgcgacagcggaggacgagccggggtatgactactggggtcagggaaccctggtcaccgtctcgagcg

SEQ ID NO: 870 - DNA, 355 bp, Homo sapiens
ggggtgcagctgttggagtctgggggaggcttggtacagcctggggggtccctgcgtctctcctgtgcagcctccggattcatctttgcttggtatgatatggggtgggcccgccaggctccagggaagggtctagagtgggtctcaagtattgattggcatggttacgttacatactacgcagactccgtgaagggccggttcaccatctcccgcgacaattccaagaacacgctgtatctgcaaatgaacagcctgcgtgccgaggacaccgcggtatattactgtgcgacagcggaggacgagccggggtatgactactggggtcagggaaccctggtcaccgtctcgagcg

SEQ ID NO: 871 - DNA, 355 bp, Homo sapiens
ggggtgcagctgttggagtctgggggaggcttggtacagcctggggggtccctgcgtctctcctgtgcagcctccggattcatctttgcttggtatgatatggggtgggcccgccaggctccagggaagggtctagagtgggtctcaagtattgattggcatggtgacgttacatactacgcagactccgtgaagggccggttcaccatctcccgcgacaattccaagaacacgctgtatctgcaaatgaacagcctgcgtgccgaggacaccgcggtatattactgtgcgacagcggaggacgagccggggtatgactactggggtcagggaaccctggtcaccgtctcgagcg

SEQ ID NO: 872 - DNA, 355 bp, Homo sapiens
ggggtgcagctgttggagtctgggggaggcttggtacagcctggggggtccctgcgtctctcctgtgcagcctccggattcatctttgcttggtatgatatggggtgggcccgccaggctccagggaagggtctagagtgggtctcaagtattgattggcatggtaccgttacatactacgcagactccgtgaagggccggttcaccatctcccgcgacaattccaagaacacgctgtatctgcaaatgaacagcctgcgtgccgaggacaccgcggtatattactgtgcgacagcggaggacgagccggggtatgactactggggtcagggaaccctggtcaccgtctcgagcg

SEQ ID NO: 873 - DNA, 355 bp, Homo sapiens
ggggtgcagctgttggagtctgggggaggcttggtacagcctggggggtccctgcgtctctcctgtgcagcctccggattcatctttgcttggtatgatatggggtgggcccgccaggctccagggaagggtctagagtgggtctcaagtattgattggcatggtatggttacatactacgcagactccgtgaagggccggttcaccatctcccgcgacaattccaagaacacgctgtatctgcaaatgaacagcctgcgtgccgaggacaccgcggtatattactgtgcgacagcggaggacgagccggggtatgactactggggtcagggaaccctggtcaccgtctcgagcg

SEQ ID NO: 874 - DNA, 355 bp, Homo sapiens
ggggtgcagctgttggagtctgggggaggcttggtacagcctggggggtccctgcgtctctcctgtgcagcctccggattcatctttaactggtatgatatggggtgggcccgccaggctccagggaagggtctagagtgggtctcaagtattgattggcatggtaatgttacatactacgcagactccgtgaagggccggttcaccatctcccgcgacaattccaagaacacgctgtatctgcaaatgaacagcctgcgtgccgaggacaccgcggtatattactgtgcgacagcggaggacgagccggggtatgactactggggtcagggaaccctggtcaccgtctcgagcg

SEQ ID NO: 875 - DNA, 355 bp, Homo sapiens
ggggtgcagctgttggagtctgggggaggcttggtacagcctggggggtccctgcgtctctcctgtgcagcctccggattcatctttcactggtatgatatggggtgggtccgccaggctccagggaagggtctagagtgggtctcaagtattgattggcatggtaatgttacatactacgcagactccgtgaagggccggttcaccatctcccgcgacaattccaagaacacgctgtatctgcaaatgaacagcctgcgtgccgaggacaccgcggtatattactgtgcgacagcggaggacgagcccgggtatgactactggggtcagggaaccctggtcaccgtctcgagcg

SEQ ID NO: 876 - DNA, 355 bp, Homo sapiens
ggggtgcagctgttggagtctgggggaggcttggtacagcctggggggtccctgcgtctctcctgtgcagcctccggattcatctttcagtggtatgatatggggtgggcccgccaggctccagggaagggtctggagtgggtctcaagtattgattggcatggtgatgttacatactacgcagactctgtgaagggccggttcaccatctcccgcgacaattccaagaacacgctgtatctgcaaatgaacagcctgcgtgccgaggacaccgcggtatattactgtgcgacagcggaggacgagccggggtatgactactggggtcagggaaccctggtcaccgtctcgagcg

SEQ ID NO: 877 - DNA, 355 bp, Homo sapiens
ggggtgcagctgttggagtctgggggaggcttggtacagcctggggggtccctgcgtctctcctgtgcagcctccggattcatctttacctggtatgatatggggtgggcccgccaggctccagggaagggtctagagtgggtctcaagtattgattggcatggtaatgttacgtactacgcagactccgtgaagggccggttcaccatctcccgcgacaattccaagaacacgctgtatctgcaaatgaacagcctgcgtgccgaggacaccgcggtatattactgtgcgacagcggaggacgagccggggtatgactactggggtcagggaaccctggtcaccgtctcgagcg

SEQ ID NO: 878 - DNA, 355 bp, Homo sapiens
ggggtgcagctgttggagtctgggggaggcttggtacagcctggggggtccctgcgtctctcctgtgcagcctccggattcatctttgtgtggtatgatatggggtgggcccgccaggctccagggaagggtctagagtgggtctcaagtattgattggcatggtaatgttacatactacgcagactctgtgaagggccggttcaccatctcccgcgacaattccaagaacacgctgtatctgcaaatgaacagcctgcgtgccgaggacaccgcggtatattactgtgcgacagcggaggacgagccggggtatgactactggggtcagggaaccctggtcaccgtctcgagcg

SEQ ID NO: 879 - DNA, 355 bp, Homo sapiens
ggggtgcagctgttggagtctgggggaggcttggtacagcctggggggtccctgcgtctctcctgtgcagcctccggattcatcttttactggtatgatatggggtgggcccgccaggctccagggaagggtctagagtgggtctcaagtattgattggcatggtaatgttacatactacgcagactccgtgaagggccggttcaccatctcccgcgacaattccaagaacacgctgtatctgcaaatgaacagcctgcgtgccgaggacaccgcggtatattactgtgcgacagcggaggacgagccggggtatgactactggggtcagggaaccctggtcaccgtctcgagcg

SEQ ID NO: 880 - DNA, 355 bp, Homo sapiens
  misc_feature 347, 349: n = A,T,C or G
ggggtgcagctgttggagtctgggggaggcttggtacagcctggggggtccctgcgtctctcctgtgcagcctccggattcatctttgctgtgtatgatatggggtgggcccgccaggctccagggaagggtctagagtgggtctcaagtattgattggcatggtaatgttacatactacgcagactccgtgaagggccggttcaccatctcccgcgacaattccaagaacacgctgtatctgcaaatgaacagcctgcgtgccgaggacaccgcggtatattactgtgcgacagcggaggacgagccggggtatgactactggggtcagggaaccctggtcaccgnantcgagc

SEQ ID NO: 881 - DNA, 354 bp, Homo sapiens
ggggtgcagctgttggagtctgggggaggcttggtacagcctggggggtccctgcgtctctcctgtgcagcctccggattcatctttgcttggtatgatatgatgtgggcccgccaggctccagggaagggtctagagtgggtctcaagtattgattggcatggtaatgttacatactacgcagactccgtgaagggccggttcaccatctcccgcgacaattccaagaacacgctgtatctgcaaatgaacagcctgcgtgccgaggacaccgcggtatattactgtgcgacagcggaggacgagccggggtatgactactggggtcagggaaccctggtcaccgtctcgagc

SEQ ID NO: 882 - DNA, 354 bp, Homo sapiens
ggggtgcagctgttggagtctgggggaggcttggtacagcctggggggtccctgcgtctctcctgtgcagcctccggattcatctttgcttggtatgatatgtactgggtccgccaggctccagggaagggtctagagtgggtctcaagtattgattggcatggtaatgttacatactacgcagactccgtgaagggccggttcaccatctcccgcgacaattccaagaacacgctgtatctgcaaatgaacagcctgcgtgccgaggacaccgcggtatattactgtgcgacagcggaggacgagccggggtatgactactggggtcagggaaccctggtcaccgtactcgag

SEQ ID NO: 883 - DNA, 354 bp, Homo sapiens
ggggtgcagctgttggagtctgggggaggcttggtacagcctggggggtccctgcgtctctcctgtgcagcctccggattcatctttgcttggtatgcgatggggtgggcccgccaggctccagggaagggtctagagtgggtctcaagtattgattggcatggtaatgttacatactacgcagactccgtgaagggccggttcaccatctcccgcgacaattccaagaacacgctgtatctgcaaatgaacagcctgcgtgccgaggacaccgcggtatattactgtgcgacagcggaggacgagccggggtatgactacttgggtcagggaaccctggtcaccgtctcgagc

SEQ ID NO: 884 - DNA, 354 bp, Homo sapiens
ggggtgcagctgttggagtctgggggaggcttggtacagcctggggggtccctgcgtctctcctgtgcagcctccggattcatctttgcttggtatgatatgcagtgggcccgccaggctccagggaagggtctagagtgggtctcaagtattgattggcatggtaatgttacatactacgcagactccgtgaagggccggttcaccatctcccgcgacaattccaagaacacgctgtatctgcaaatgaacagcctgcgtgccgaggacaccgcggtatattactgtgcgacagcggaggacgagccggggtatgactactggggtcagggaaccctggtcaccgtctcgagc

SEQ ID NO: 885 - DNA, 354 bp, Homo sapiens
gaggtgcagctgttggagtctgggggaggcttggtacagcctggggggtccctgcgtctctcctgtgcagcctccggattcatctttgcttggtatgatatggggtgggcccgccaggctccagggaagggtctagagtgggtctcaagtattgattggcatggtaatgttacatactacgcagactccgtgaagggccggttcaccatctcccgcgacaattccaagaacacgctgtatctgcaaatgaacagcctgcgtgccgaggacaccgcggtatattactgtgcgacagcggaggacgagccggggtatgactactggggtcagggaaccctggtcaccgtctcgagc

SEQ ID NO: 886 - DNA, 354 bp, Homo sapiens
gaggtgcagctgttggagtctgggggaggcttggtacagcctggggggtccctgcgtctctcctgtgcagcctccggattcatctttgcttggtatgatatggggtgggcccgccaggctccagggaagggtctagagtgggtctcaagtattgattggaggggtaatgttacatactacgcagactccgtgaagggccggttcaccatctcccgcgacaattccaagaacacgctgtatctgcaaatgaacagcctgcgtgccgaggacaccgcggtatattactgtgcgacagcggaggacgagccggggtatgactactggggtcagggaaccctggtcaccgtctcgagc

SEQ ID NO: 887 - DNA, 354 bp, Homo sapiens
ggggtgcagctgttggagtctgggggaggcttggtacagcctggggggtccctgcgtctctcctgtgcagcctccggattcatctttgcttggtatgatatggggtgggtccgccaggctccagggaagggtctagagtgggtctcaagtattgattggcatggtaatgttacatactacgcagactccgtgaagggccggttcaccatctcccgcgacaattccaagaacacgctgtatctgcaaatgaacagcctgcgtgccgaggacaccgcggtatattactgtgcgacagcggaggacgagccggggtatgactactggggtcagggaaccctggtcaccgtctcgagc

SEQ ID NO: 888 - DNA, 354 bp, Homo sapiens
ggggtgcagctgttggagtctgggggaggcttggtacagcctggggggtccctgcgtctctcctgtgcagcctccggattcatctttgcttggtatgatatggggtgggtccgccaggctccagggaagggtctagagtgggtctcaagtattgattggaggggtaatgttacatactacgcagactccgtgaagggccggttcaccatctcccgcgacaattccaagaacacgctgtatctgcaaatgaacagcctgcgtgccgaggacaccgcggtatattactgtgcgacagcggaggacgagccggggtatgactactggggtcagggaaccctggtcaccgtctcgagc

SEQ ID NO: 889 - DNA, 354 bp, Homo sapiens
gaggtgcagctgttggagtctgggggaggcttggtacagcctggggggtccctgcgtctctcctgtgcagcctccggattcatctttgcttggtatgatatggggtgggtccgccaggctccagggaagggtctagagtgggtctcaagtattgattggcatggtaatgttacatactacgcagactccgtgaagggccggttcaccatctcccgcgacaattccaagaacacgctgtatctgcaaatgaacagcctgcgtgccgaggacaccgcggtatattactgtgcgacagcggaggacgagccggggtatgactactggggtcagggaaccctggtcaccgtctcgagc

SEQ ID NO: 890 - DNA, 354 bp, Homo sapiens
gaggtgcagctgttggagtctgggggaggcttggtacagcctggggggtccctgcgtctctcctgtgcagcctccggattcatctttgcttggtatgatatggggtgggtccgccaggctccagggaagggtctagagtgggtctcaagtattgattggaggggtaatgttacatactacgcagactccgtgaagggccggttcaccatctcccgcgacaattccaagaacacgctgtatctgcaaatgaacagcctgcgtgccgaggacaccgcggtatattactgtgcgacagcggaggacgagccggggtatgactactggggtcagggaaccctggtcaccgtctcgagc

SEQ ID NO: 891 - DNA, 354 bp, Homo sapiens
gaggtgcagctgttggagtctgggggaggcttggtacagcctggggggtccctgcgtctctcctgtgcagcctccggattcatctttgcttggtatgatatggggtgggcccgccaggctccagggaagggtctagagtgggtctcaagtattgattggcatggtgaggttacatactacgcagactccgtgaagggccggttcaccatctcccgcgacaattccaagaacacgctgtatctgcaaatgaacagcctgcgtgccgaggacaccgcggtatattactgtgcgacagcggaggacgagccggggtatgactactggggccagggaaccctggtcaccgtctcgagc

SEQ ID NO: 892 - DNA, 354 bp, Homo sapiens
ggggtgcagctgttggagtctgggggaggcttggtacagcctggggggtccctgcgtctctcctgtgcagcctccggattcatctttgcttggtatgatatggggtgggtccgccaggctccagggaagggtctagagtgggtctcaagtattgattggcatggtgaggttacatactacgcagactccgtgaagggccggttcaccatctcccgcgacaattccaagaacacgctgtatctgcaaatgaacagcctgcgtgccgaggacaccgcggtatattactgtgcgacagcggaggacgagccggggtatgactactggggccagggaaccctggtcaccgtctcgagc

SEQ ID NO: 893 - DNA, 354 bp, Homo sapiens
gaggtgcagctgttggagtctgggggaggcttggtacagcctggggggtccctgcgtctctcctgtgcagcctccggattcatctttgcttggtatgatatggggtgggtccgccaggctccagggaagggtctagagtgggtctcaagtattgattggcatggtgaggttacatactacgcagactccgtgaagggccggttcaccatctcccgcgacaattccaagaacacgctgtatctgcaaatgaacagcctgcgtgccgaggacaccgcggtatattactgtgcgacagcggaggacgagccggggtatgactactggggccagggaaccctggtcaccgtctcgagc

SEQ ID NO: 894 - DNA, 355 bp, Homo sapiens
ggggtgcagctgttggagtctgggggaggcttggtacagcctggggggtccctgcgtctctcctgtgcagcctccggattcatctttcagtggtatgatatggggtgggtccgccaggctccagggaagggtctggagtgggtctcaagtattgattggcatggtgatgttacatactacgcagactctgtgaagggccggttcaccatctcccgcgacaattccaagaacacgctgtatctgcaaatgaacagcctgcgtgccgaggacaccgcggtatattactgtgcgacagcggaggacgagccggggtatgactactggggtcagggaaccctggtcaccgtctcgagcg

SEQ ID NO: 895 - DNA, 355 bp, Homo sapiens
gaggtgcagctgttggagtctgggggaggcttggtacagcctggggggtccctgcgtctctcctgtgcagcctccggattcatctttcagtggtatgatatggggtgggtccgccaggctccagggaagggtctggagtgggtctcaagtattgattggcatggtgatgttacatactacgcagactctgtgaagggccggttcaccatctcccgcgacaattccaagaacacgctgtatctgcaaatgaacagcctgcgtgccgaggacaccgcggtatattactgtgcgacagcggaggacgagccggggtatgactactggggtcagggaaccctggtcaccgtctcgagcg

SEQ ID NO: 896 - DNA, 354 bp, Homo sapiens
ggggtgcagctgttggagtctgggggaggcttggtacagcctggggggtccctgcgtctctcctgtgcagcctccggattcatctttgcttggtatgatatggggtgggcccgccaggctccagggaagggtctagagtgggtctcaagtattgattggcatggtaatgttacatactacgcagactccgtgaagggccggttcaccatctcccgcgacaattccaagaacacgctgtatctgcaaatgatcagcctgcgtgccgaggacaccgcggtatattactgtgcgacagcggaggatgagccggggtatgactactggggtcagggaaccctggtcaccgtctcgagc

SEQ ID NO: 897 - DNA, 354 bp, Homo sapiens
ggggtgcagctgttggagtctgggggaggcttggtacagcctggggggtccctgcgtctctcctgtgcagcctccggattcatctttgcttggtatgatatggggtgggcccgccaggctccagggaagggtctagagtgggtctcaagtattgattggcatggtaatgttacatactacgcagactccgtgaagggccggttcatcatctcccgcgacaattccaagaacacgctgtatctgcaaatgaacagcctgcgtgccgaggacaccgcggtatattactgtgcgacagcggaggacgagccggggtatgactactggggtcagggaaccctggtcaccgtctcgagc

SEQ ID NO: 898 - DNA, 354 bp, Homo sapiens
ggggtgcagctgttggagtctgggggaggcttggtacagcctggggggtccctgcgtctctcctgtgcagcctccggattcatctttgcttggtatgatatggggtgggcccgccaggctccagggaagggtctagagtgggtctcaagtattgattggcatggtaatgttatatactacgcagactccgtgaagggccggttcaccatctcccgcgacaattccaagaacacgctgtatctgcaaatgaacagcctgcgtgccgaggacaccgcggtatattactgtgcgacagcggaggacgagccggggtatgactactggggtcagggaaccctggtcaccgtctcgagc

SEQ ID NO: 899 - DNA, 354 bp, Homo sapiens
ggggtgcagctgttggagtccgggggaggcttggtacagcctggggggtccctgcgtctctcctgtgcagcctccggattcatctttgcttggtatgatatggggtgggcccgccaggctccagggaagggtctagagtgggtctcaagtattgattggcatggtaatgctacatactacgcagactccgtgaagggccggttcaccatctcccgcgacaattccaagaacacgctgtatctgcaaatgaacagcctgcgtgccgaggacaccgcggtatattactgtgcgacagcggaggacgagccggggtatgactactggggtcagggaaccctggtcaccgtctcgagc

SEQ ID NO: 900 - DNA, 354 bp, Homo sapiens
ggggtgcagctgttggagtctggggggggcttggtacagcctggggggtccctgcgtctctcctgtgcagcctccggattcatctttgcttggtatgatatggggtgggcccgccaggctccagggaagggtctagagtgggtctcaagtattgattggcatggtaatgttacatactacgcagactccgagaagggccggttcaccatctcccgcgacaattccaagaacacgctgtatctgcaaatgaacagcctgcgtgccgaggacaccgcggtatattactgtgcgacagcggaggacgagccggggtatgactactggggtcagggaaccctggtcaccgtctcgagc

SEQ ID NO: 901 - DNA, 354 bp, Homo sapiens
ggggtgcagctgttggagtctgggggaggcttggtacagcctggggggtccctgcgtctctcctgtgcagcctccggattcatctttgcttggtatgatatggggtgggcccgccaggctccagggaagggtctagagtgggtcacaagtattgattggcatggtaatgttacatactacgcagactctgtgaagggccggttcaccatctcccgcgacaattccaagaacacgctgtatctgcaaatgaacagcctgcgtgccgaggacaccgcggtatattactgtgcgacagcggaggacgagccggggtatgactactggggtcagggaaccctggtcaccgtctcgagc

SEQ ID NO: 902 - DNA, 354 bp, Homo sapiens
ggggtgcagctgttggagtctgggggtggcttggtacagcctggggggtccctgcgtctctcctgtgcagcctccggattcatctttgcttggtatgatatggggtgggcccgccaggctccagggaagggtctagagtgggtctcaagtattgattggcatggtaatgttacatactacgcagactccgtgaagggccggttcaccatctcccgcgacaattccaagaacacgctgtatctgcaaatgaacagcctgcgtgccgaggacaccgcggtatattactgtgcgacagcggaggacgagccggggtatgactactggggtcacggaaccctggtcaccgtctcgagc

SEQ ID NO: 903 - DNA, 354 bp, Homo sapiens
ggggtgcagctgttggagtctgggggaggcttggtacaccctggggggtccctgcgtctctcctgtgcagcctccggattcatctttgcttggtatgatatggggtgggcccgccaggctccagggaagggtctagagtgggtctcaagtattgattggcatggtaatgttacatactacgcagactccgtgaagggccggttcaccatctcccgcgacaattccaagaacacgctgtatctgcaaatgaacagcctgcgtgccgaggacaccgcggtatattactgtgcgacagcggaggacgagccggggtatgactactggggtcagggaaccctggtcaccgtctcgagc

SEQ ID NO: 904 - DNA, 354 bp, Homo sapiens
ggggtgcggctgttggagtctgggggaggcttggtacagcctggggggtccctgcgtctctcctgtgcagcctccggattcatctttgcttggtatgatatggggtgggcccgccaggctccagggaagggtctagagtgggtctcaagtattgattggcatggtaatgttacatactacgcagactccgtgaagggccggttcaccatctcccgcgacaattccaagaacacgctgtatctgcaaatgaacagcctgcgtgccgaggacaccgcggtatattactgtgcgacagcggaggacgagccggggtatgactactggggtcagggaaccctggtcaccgtctcgagc

SEQ ID NO: 905 - DNA, 354 bp, Homo sapiens
ggggtgcagctgttggagtctgggggaggcttggtacagcctggggggtccctgcgtctctcctgtgcagcctccggattcatctttgcttggtatgatatggggtgggcccgccaggctccagggaagggtctagagtgggtctcaagtattgattggcatggtaatgttacatacaacgcagactccgtgaagggccggttcaccatctcccgcgacaattccaagaacacgctgtatctgcaaatgaacagcctgcgtgccgaggacaccgcggtatattactgtgcgacagcggaggacgagccggggtatgactactggggtcagggaaccctggtcaccgtctcgagc

SEQ ID NO: 906 - DNA, 354 bp, Homo sapiens
ggggtgcagctgttggagtctgggggaggcttggtacagcctggggggtccctgcgtctctcctgtgcagcctccggattcatctttgcttggtatgatatggggtgggcccgccaggctccagggaagggtctagagtgggtctcaagtattgattggcatgataatgttacatactacgcagactccgtgaagggccggttcaccatctcccgcgacaattccaagaacacgctgtatctgcaaatgaacagcctgcgtgccgaggacaccgcggtatattactgcgcgacagcggaggacgagccggggtatgactactggggtcagggaaccctggtcaccgtctcgagc

SEQ ID NO: 907 - DNA, 354 bp, Homo sapiens
ggggtgcagctgttggagtctgggggaggcttggtacagcctggggggtccctgcgtctctcctgtgcagcctccggattcatctttgcttggtatgatatggggtgggcccgccaggctccagggaagggtctagagtgggtatcaagtattgattggcatggtaatgtttcatactacgcagactccgtgaagggccggttcaccatctcccgcgacaattccaagaacacgctgtatctgcaaatgaacagcctgcgtgccgaggacaccgcggtatattactgtgcgacagcggaggacgagccggggtatgactactggggtcagggaaccctggtcaccgtctcgagc

SEQ ID NO: 908 - DNA, 354 bp, Homo sapiens
ggggtgcagctgttggagtctgggggaggcttggtacagcctggggggtccctgcgtctctcctgtgcagcctccggattcatctttgcttggtatgatatggggtgggcccgccaggctccagggaagggtctagagtgggtctcaagtattgattggcatggtaatgttacatacttcgcagactccgtgaagggccggttcgccatctcccgcgacaattccaagaacacgctgtatctgcaaatgaacagcctgcgtgccgaggacaccgcggtatattactgtgcgacagcggaggacgagccggggtatgactactggggtcagggaaccctggtcaccgtctcgagc

SEQ ID NO: 909 - DNA, 354 bp, Homo sapiens
ggggtgcagctgttggagtctgggggaggcttggtacagtctggggggtccctgcgtctctcctgtgcagcctccggattcatctttgcttggtatgatatggggtgggcccgccaggctccagggaagggtctagagtgggtctcaagtattgattggcatggtaatgttacatactacgcagactccgtgaagggccggttcaccatctcccgcgacaattccaagaacacgctgtatttgcaaatgaacagcctgcgtgccgaggataccgcggtatattactgtgcgacagcggaggacgagccggggtatgactactggggtcagggaaccctggtcaccgtctcgagc

SEQ ID NO: 910 - DNA, 354 bp, Homo sapiens; identical to SEQ ID NO: 785

SEQ ID NO: 911 - DNA, 354 bp, Homo sapiens
ggggtgcagctgtcggagtctgggggaggcttggtacagcctggggggtccctgcgtctctcctgtgcagcctctggattcatctttgcttggtatgatatggggtgggcccgccaggctccagggaagggtctagagtgggtctcaagtattgattggcatggtaatgttacgtactacgcagactccgtgaagggccggttcaccatctcccgcgacaattccaagaacacgctttatctgcaaatgaacagcctgcgtgccgaggacaccgcggtatattactgtgcgacagcggaggacgagccggggtatgactactggggtcagggaaccctggtcaccgtctcgagc

SEQ ID NO: 912 - DNA, 354 bp, Homo sapiens
ggggtgcagctgttggagtctgggggaggcttggtacagcctggggggtccctgcgtctctcctgtgcagcctccggattcatctttgcttggtatgatatggggtgggcccgccaggctccagggaagggtctagagtgggtctcaagtattgattggcatggtaatgttacatactacgcagactccgtgaagggccggttcaccatctcccgcgacaattccaagaacacgctgtatctgcaaatgaacagcctgcgtgccgaggacaccgcggtatattactgtgcgacagcggaggacgagccggggtatgactactggggtcatggaaccgtggtcaccgtctcgagc

SEQ ID NO: 913 - DNA, 354 bp, Homo sapiens
ggggtgcagctgttggagtctgggggaggcttggtacatcctggggggtccctgcgtctctcctgtgcagcctccggattcatctttgcttggtatgatatggggtgggcccgccaggctccagggaagggtctagagtgggtctcaagtattgattggcatggtaatgttacaaactacgcagactccgtgaagggccggttcaccatctcccgcgacaattccaagaacacgctgtatctgcaaatgaacagcctgcgtgccgaggacaccgcggtatattactgtgcgacagcggaggacgagccggggtatgactactggggtcagggaaccctggtcaccgtctcgagc

SEQ ID NO: 914 - DNA, 354 bp, Homo sapiens
ggggtgcagctgttggattctgggggaggcttggtacagcctggggggtccctgcgtctctcctgtgcagcctccggattcatctttgcttggtatgatatggggtgggcccgccaggctccagggaagggtctagagtgggtctcaagtattgattggcatggtaatgttacatactacgcagactccgtgaagggccggttcaccatctcccgcgacaattccaagaacacgctgtatctgcaaatgaacagcctgcgtgccgaggacaccgcggtatattactgtgcgacagcggaggacgagccggggtatgactactggggtcagggaaccctggtcaccgtctcgagc

SEQ ID NO: 915 - DNA, 354 bp, Homo sapiens
ggggtgcagctgttggagtctgggggaggcttggtacagcctggggggtccctgcgtctatcctgtgcagcctccggattcatctttgcttggtatgatatggggtgggcccgccaggctccagggaagggtctagagtgggtctcaagtattgattggcatggtaatgatacatactacgcagactccgtgaagggccggttcaccatctcccgcgacaattccaagaacacgctgtatctgcaaatgaacagcctgcgtgccgaggacaccgcggtatattactgtgcgacagcggaggatgagccggggtatgactactggggtcagggaaccctggtcaccgtctcgagc

SEQ ID NO: 916 - DNA, 354 bp, Homo sapiens
ggggtgcagctgttggagtctgggggaggcttggtacagcctggggggtccctgcgtctctcctgtgcagcctccggattcatctttgcttggtatgatatggggtgggtccgccaggctccagggaagggtctagagtgggtctcaagtattgatgatcatggtaatgttacatactacgcagactccgtgaagggccggttcaccatctcccgcgacaattccaagaacacgctgtatctgcaaatgaacagcctgcgtgccgaggacaccgcggtatattactgtgcgacagcggaggacgagccggggtatgactactggggtcagggaaccctggtcaccgtctcgagc

SEQ ID NO: 917 - DNA, 354 bp, Homo sapiens
ggggtgcagctgttggagtctgggggaggcttggtacagcctggggggtccctgcgtctctcctgtgcagcctccggattcatctttgcttggtatgatatggggtgggtccgccaggctccagggaagggtctagagtgggtctcaagtattgattggtctggtaatgttacatactacgcagactccgtgaagggccggttcaccatctcccgcgacaattccaagaacacgctgtatctgcaaatgaacagcctgcgtgccgaggacaccgcggtatattactgtgcgacagcggaggacgagccggggtatgactactggggtcagggaaccctggtcaccgtctcgagc

SEQ ID NO: 918 - DNA, 354 bp, Homo sapiens
ggggtgcagctgttggagtctgggggaggcttggtacagcctggggggtccctgcgtctctcctgtgcagcctccggattcatctttgcttggtatgatatggggtgggtccgccaggctccagggaagggtctagagtgggtctcaagtattgattggcatggtacggttacatactacgcagactccgtgaagggccggttcaccatctcccgcgacaattccaagaacacgctgtatctgcaaatgaacagcctgcgtgccgaggacaccgcggtatattactgtgcgacagcggaggacgagccggggtatgactactggggtcagggaaccctggtcaccgtctcgagc

SEQ ID NO: 919 - DNA, 354 bp, Homo sapiens
ggggtgcagctgttggagtctgggggaggcttggtacagcctggggggtccctgcgtctctcctgtgcagcctccggattcatctttgcttggtatgatatggggtgggtccgccaggctccagggaagggtctagagtgggtctcaagtattgattggcatggtaatcagacatactacgcagactccgtgaagggccggttcaccatctcccgcgacaattccaagaacacgctgtatctgcaaatgaacagcctgcgtgccgaggacaccgcggtatattactgtgcgacagcggaggacgagccggggtatgactactggggtcagggaaccctggtcaccgtctcgagc

SEQ ID NO: 920 - DNA, 354 bp, Homo sapiens
ggggtgcagctgttggagtctgggggaggcttggtacagcctggggggtccctgcgtctctcctgtgcagcctccggattcatctttgcttggtatgatatggggtgggtccgccaggctccagggaagggtctagagtgggtctcaaagattactgatcttggttatgctacatactacgcagactccgtgaagggccggttcaccatctcccgcgacaattccaagaacacgctgtatctgcaaatgaacagcctgcgtgccgaggacaccgcggtatattactgtgcgacagcggaggacgagccggggtatgactactggggtcagggaaccctggtcaccgtctcgagc

SEQ ID NO: 921 - DNA, 354 bp, Homo sapiens
ggggtgcagctgttggagtctgggggaggcttggtacagcctggggggtccctgcgtctctcctgtgcagcctccggattcatctttgcttggtatgatatggggtgggcccgccaggctccagggaagggtctagagtgggtctcaagtattgattggcatagtaatgttacatactacgcagactccgtgaagggccggttcaccatctcccgcgacaattccaagaacacgctgtatctgcaaatgaacagcctgcgtgccgaggacaccgcggtatattactgtgcgacagcggaggacgagccggggtatgactactggggtcagggaaccctggtcaccgtctcgagc

SEQ ID NO: 922 - DNA, 354 bp, Homo sapiens
ggggtgcagctgttggagtctgggggaggcttggtacagcctggggggtccctgcgtctctcctgtgcagcctccggattcatctttgcttggtatgatatggggtgggcccgccaggctccagggaagggtctagagtgggtctcacatattgattggcatggtaatgttacatactacgcagactccgtgaagggccggttcaccatctcccgcgacaattccaagaacacgctgtatctgcaaatgaacagcctgcgtgccgaggacaccgcggtatattactgtgcgacagcggaggacgagccggggtatgactactggggtcagggaaccctggtcaccgtctcgagc

SEQ ID NO: 923 - DNA, 354 bp, Homo sapiens
ggggtgcagctgttggagtctgggggaggcttggtacagcctggggggtccctgcgtctctcctgtgcagcctccggattcatctttgcttggtatgatatggggtgggctcgccaggctccagggaagggtctagagtgggtctcaactattaatgatcatggtaatgttacatactacgcagactccgtgaagggccggttcaccatctcccgcgacaattccaagaacacgctgtatctgcaaatgaacagcctgcgtgccgaggacaccgcggtatattactgtgcgacagcggaggacgagccggggtatgactactggggtcagggaaccctggtcaccgtctcgagc

SEQ ID NO: 924 - DNA, 354 bp, Homo sapiens
ggggtgcagctgttggagtctgggggaggcttggtacagcctggggggtccctgcgtctctcctgtgcagcctccggattcatctttgcttggtatgatatggggtgggcccgccaggctccagggaagggtcttgagtgggtctcaagtattgattggcgtggttctgttacatactacgcagactccgtgaagggccggttcaccatctcccgcgacaattccaagaacacgctgtatctgcaaatgaacagcctgcgtgccgaggacaccgcggtatattactgtgcgacagcggaggacgagccggggtatgactactggggtcagggaaccctggtcaccgtctcgagc

SEQ ID NO: 925 - DNA, 354 bp, Homo sapiens
ggggtgcagctgttggagtctgggggaggcttggtacagcctggggggtccctgcgtctctcctgtgcagcctccggattcatctttgcttggtatgatatggggtgggcccgccaggctccagggaagggtctagagtgggtctcaagtattgattggtatggtttggttacatactacgcagactccgtgaagggccggttcaccatctcccgcgacaattccaagaacacgctgtatctgcaaatgaacagcctgcgtgccgaggacaccgcggtatattactgtgcgacagcggaggacgagccggggtatgactactggggtcagggaaccctggtcaccgtctcgagc

SEQ ID NO: 926 - DNA, 354 bp, Homo sapiens
ggggtgcagctgttggagtctgggggaggcttggtacagcctggggggtccctgcgtctctcctgtgcagcctccggattcatctttgcttggtatgatatggggtgggcccgccaggctccagggaagggtctagagtgggtctcaagtattgattggcatggttttgttacatactacgcagactccgtgaagggccggttcaccatctcccgcgacaattccaagaacacgctgtatctgcaaatgaacagcctgcgtgccgaggacaccgcggtatattactgtgcgacagcggaggacgagccggggtatgactactggggtcagggaaccctggtcaccgtctcgagc

SEQ ID NO: 927 - DNA, 354 bp, Homo sapiens
ggggtgcagctgttggagtctgggggaggcttggtacagcctggggggtccctgcgtctctcctgtgcagcctccggattcatctttgcttggtatgatatggggtgggcccgccaggctccagggaagggtctagagtgggtctcaagtattgatgagcctggtcgtgttacatactacgcagactccgtgaagggccggttcaccatctcccgcgacaattccaagaacacgctgtatctgcaaatgaacagcctgcgtgccgaggacaccgcggtatattactgtgcgacagcggaggacgagccggggtatgactactggggtcagggaaccctggtcaccgtctcgagc

SEQ ID NO: 928 - DNA, 354 bp, Homo sapiens
ggggtgcagctgttggagtctgggggaggcttggtacagcctggggggtccctgcgtctctcctgtgcagcctccggattcatctttgcttggtatgatatggggtgggtccgccaggctccagggaagggtctagagtgggtctcaagtattgattggtggggtgaggttacatactacgcagactccgtgaagggccggttcaccatctcccgcgacaattccaagaacacgctgtatctgcaaatgaacagcctgcgtgccgaggacaccgcggtatattactgtgcgacagcggaggacgagccggggtatgactactggggtcagggaaccctggtcaccgtctcgagc

SEQ ID NO: 929 - DNA, 354 bp, Homo sapiens
ggggtgcagctgttggagtctgggggaggcttggtacagcctggggggtccctgcgtctctcctgtgcagcctccggattcatctttgcttggtatgatatggggtgggtccgccaggctccagggaagggtctagagtgggtctcaagtattgattggaggggtattgttacatactacccagactccgtgaagggccggttcaccatctcccgcgacaattccaagaacacgctgtatctgcaaatgaacagcctgcgtgccgaggacaccgcggtatattactgtgcgacagcggaggacgagccggggtatgactactggggtcagggaaccctggtcaccgtctcgagc

SEQ ID NO: 930 - DNA, 354 bp, Homo sapiens
ggggtgcagctgttggagtctgggggaggcttggtacagcctggggggtccctgcgtctctcctgtgcagcctccggattcatctttgcttggtatgatatggggtgggtccgccaggctccagggaagggtctagagtgggtctcaagtattgattggcggggtttgttgacatactacgcagactccgtgaagggccggttcaccatctcccgcgacaattccaagaacacgctgtatctgcaaatgaacagcctgcgtgccgaggacaccgcggtatattactgtgcgacagcggaggacgagccggggtatgactactggggtcagggaaccctggtcatcgtctcgagc

SEQ ID NO: 931 - DNA, 354 bp, Homo sapiens
ggggtgcagctgttggagtctgggggaggcttggtactgcctggggggtccctgcgtctctcctgtgcagcctccggattcatctttgcttggtatgatatggggtgggcccgccaggctccagggaagggtctagagtgggtctcaagtattgattggcggggtggtctgacatactacgcagactccgtgaagggccggttcaccatctcccgcgacaattccaagaacacgctgtatctgcaaatgaacagcctgcgtgccgaggacaccgcggtatattactgtgcgacagcggaggacgagccggggtatgactactggggtcagggaaccctggtcaccgtctcgagc

SEQ ID NO: 932 - DNA, 354 bp, Homo sapiens
ggggtgcagctgttggagtctgggggaggcttggtacagcctggggggtccctgcgtctctcctgtgcagcctccggattcatctttgcttggtatgatatggggtgggcccgccaggctccagggaagggtctagagtgggtctcaagtattgattggaggggtaaggctacatactacgcagactccgtgaagggccggttcaccatctcccgcgacaattccaagaacacgctgtatctgcaaatgaacagcctgcgtgccgaggacaccgcggtatattactgtgcgacagcggaggacgagccggggtatgactactggggtcagggaaccctggtcaccgtctcgagc

SEQ ID NO: 933 - DNA, 354 bp, Homo sapiens
ggggtgcagctgttggagtctgggggaggcttggtacagcctggggggtccctgcgtctctcctgtgcagcctccggattcatctttgcttggtatgatatggggtgggcccgccaggctccagggaagggtctagagtgggtctcaagtattgattggaggggtttgtctacatactacgcagactccgtgaagggccggttcaccatctcccgcgacaattccaagaacacgctgtatctgcaaatgaacagcctgcgtgccgaggacaccgcggtatattactgtgcgacagcggaggacgagccggggtatgactactggggtcagggaaccctggtcaccgtctcgagc

SEQ ID NO: 934 - DNA, 354 bp, Homo sapiens
ggggtgcagctgttggagtctgggggaggcttggtacagcctggggggtccctgcgtctctcctgtgcagcctccggattcatctttgcttggtatgatatggggtgggtccgccaggctccagggaagggtctagagtgggtctcaagtattgattggcatggtaagattacatactacgcagactccgtgaagggccggttcaccatctcccgcgacaattccaagaacacgctgtatctgcaaatgaacagcctgcgtgccgaggacaccgcggtatattactgtgcgacagcggaggacgagccggggtatgactactggggtcagggaaccctggtcaccgtctcgagc

SEQ ID NO: 935 - DNA, 354 bp, Homo sapiens
ggggtgcagctgttggagtctgggggaggcttggtacagcctggggggtccctgcgtctctcctgtgcagcctccggattcatctttgcttggtatgatatggggtgggcccgccaggctccagggaagggtctagagtgggtctcaagtattgattggaggggtggtacgacatactacgcagactccgtgaagggccggttcaccatctcccgcgacaattccaagaacacgctgtatctgcaaatgaacagcctgcgtgccgaggacaccgcggtatattactgtgcgacagcggaggacgagccggggtatgactactggggtcagggaaccctggtcaccgtctcgaac

SEQ ID NO: 936 - DNA, 354 bp, Homo sapiens
ggggtgcagctgttggagtctgggggaggcttggtacagcctggggggtccctgcgtctctcctgtgcagcctccggattcatctttgcttggtatgatatggggtgggcccgccaggctccagggaagggtctggagtgggtctcaagtattgattggcatggtattgagacatactacgcagactccgtgaagggccggttcaccatctcccgcgacaattccaagaacacgctgtatctgcaaatgaacagcctgcgtgccgaggacaccgcggtatattactgtgcgacagcggaggacgagccggggtatgactactggggtcagggaaccctggtcaccgtctcgagc

SEQ ID NO: 937 - DNA, 354 bp, Homo sapiens
ggggtgcagctgttggagtctgggggaggcttggtacagcctggggggtccctgcgtctctcctgtgcagcctccggattcatctttgcttggtatgatatggggtgggcccgccaggctccaggtaagggtctagagtgggtctcaagtattgattggcatggttcgattacatactacgcagactccgtgaagggccggttcaccatctcccgcgacaattccaagaacacgctgtatctgcaaatgaacagcctgcgtgccgaggacaccgcggtatattactgtgcgacagcggaggacgagccggggtatgactactggggtcagggaaccctggtcaccgtctcgagc

SEQ ID NO: 938 - DNA, 354 bp, Homo sapiens
ggggtgcagctgttggagtctgggggaggcttggtacagcctggggggtccctgcgtctctcctgtgcagcctccggattcatctttgcttggtatgatatggggtgggtccgccaggctccagggaagggtctagagtgggtctcaagtattgattggtatggtactggtacatactacgcagactccgtgaagggccggttcaccatctcccgcgacaattccaagaacacgctgtatctgcaaatgaacagcctgcgtgccgaggacaccgcggtatattactgtgcgacagcggaggacgagccggggtatgactactggggtcagggaaccctggtcaccgtctcgagc

SEQ ID NO: 939 - DNA, 354 bp, Homo sapiens
ggggtgcagctgttggagtctgggggaggcttggtacagcctggggggtccctgcgtctctcctgtgcagcctccggattcatctttgcttggtatgatatggggtgggcccgccaggctccagggaagggtctagagtgggtctcaagtattgattggcggggtacgctgacatactacgcagactccgtgaagggccggttcaccatctcccgcgacaattccaagaacacgctgtatctgcaaatgaacagcctgcgtgccgaggacaccgcggtatattactgtgcgacagcggaggacgagccggggtatgactactggggtcagggaaccctggtcaccgtctcgagc

SEQ ID NO: 940 - DNA, 354 bp, Homo sapiens
ggggtgcagctgttggagtctgggggaggcttggtacagcctggggggtccctgcgtctctcctgtgcagcctccggattcatctttgcttggtatgatatggggtgggcccgccaggctccagggaagggtctagagtgggtctcaagtattgattggcggggtcttattacatactacgcagactccgtgaagggccggttcaccatctcccgcgacaattccaagaacacgctgtatctgcaaatgaacagcctgcgtgccgaggacaccgcggtatattactgtgcgacagcggaggacgagccggggtatgactactggggtcagggaaccctggtcaccgtctcgagc

SEQ ID NO: 941 - DNA, 354 bp, Homo sapiens
ggggtgcagctgttggagtctgggggaggcttggtacagcctggggggtccctgcgtctctcctgtgcagcctccggattcatctttgcttggtatgatatggggtgggtccgccaggctccagggaagggtcttgagtgggtctcaagtattgattggcttggtaagttgacatactacgcagactccgtgaagggccggttcaccatctcccgcgacaattccaagaacacgctgtatctgcaaatgaacagcctgcgtgccgaggacaccgcggtatattactgtgcgacagcggaggacgagccggggtatgactactggggtcagggaaccctggtcaccgtctcgagc

SEQ ID NO: 942 - DNA, 354 bp, Homo sapiens
ggggtgcagctgttggagtctgggggaggcttggtacagcctggggggtccctgcgtctctcctgtgcagcctccggattcatctttgcttggtatgatatggggtgggtccgccaggctccagggaagggtctagagtgggtctcaagtattgattggtatggtaatgttacatactacgcagactccgtgaagggccggttcaccatctcccgcgacaattccaagaacacgctgtatctgcaaatgaacagcctgcgtgccgaggacaccgcggtatattactgtgcgacagcggaggacgagccggggtatgactactggggtcagggaaccctggtcaccgtctcgagc

SEQ ID NO: 943 - DNA, 354 bp, Homo sapiens
ggggtgcagctgttggagtctgggggaggcttggtacagcctggagggtccctgcgtctctcctgtgcagcctccggattcatctttgcttggtatgatatggggtgggcccgccaggctccagggaagggtctagagtgggtctcaagtattaattggttgggtaatgttacatactacgcagactccgtgaagggccggttcaccatctcccgcgacaattccaagaacacgctgtatctgcaaatgaacagcctgcgtgccgaggacaccgcggtatattactgtgcgacagcggaggacgagccggggtatgactactggggtcagggaaccctggtcaccgtctcgagc

SEQ ID NO: 944 - DNA, 354 bp, Homo sapiens
ggggtgcagctgttggagtctgggggaggcttggtacagcctggggggtccctgcgtctctcctgtgcagcctccggattcatctttgcttggtatgatatggggtgggcccgccaggctccagggaagggtctagagtgggtctcaagtattgggtggcatggtaatgttacatactacgcagactccgtgaagggccggttcaccatctcccgcgacaattccaagaacacgctgtatctgcaaatgaacagcctgcgtgccgaggacaccgcggtatattactgtgcgacagcggaggacgagccggggtatgactactggggtcagggaaccctggtcaccgtctcgagc

SEQ ID NO: 945 - DNA, 354 bp, Homo sapiens
ggggtgcagctgttggagtctgggggaggcttggtacagcctggggggtccctgcgtctctcctgtgcagcctccggattcatctttgcttggtatgatatggggtgggcccgccaggcaccagggaagggtctagagtgggtctcaagtattgattgggtgggtaatgttacatactacgcagactccgtgaagggccggttcaccatctcccgcgacaattccaagaacacgctgtatctgcaaatgaacagcctgcgtgccgaggacaccgcggtatattactgtgcgacagcggaggacgagccggggtatgactactggggtcagggaaccctggtcaccgtctcgagc

SEQ ID NO: 946 - DNA, 354 bp, Homo sapiens
ggggtgcagctgttggagtctgggggaggcttggtacagcctggggggtccctgcgtctctcctgtgcagcctccggattcatctttgcttggtatgatatggggtgggtccgccaggctccagggaagggtctagagtgggtctcaagtattaatgatggtggtaatgttacatactacgcagactccgtgaagggccggttcaccatctcccgcgacaattccaagaacacgctgtatctgcaaatgaacagcctgcgtgccgaggacaccgcggtatattactgtgcgacagcggaggacgagccggggtatgactactggggtcagggaaccctggtcaccgtctcgagc

SEQ ID NO: 947 - DNA, 355 bp, Homo sapiens
  misc_feature 318, 354: n = A,T,C or G
ggggtgcagctgttggagtctgggggaggcttggtacagcctggggggtccctgcgtctctcctgtgcagcctccggattcatctttgcttggtatgatatggggtgggcccgccaggctccagggaagggtctagagtgggtctcaagtattgattggcatggtaatgttacatactacgcagactccgtgaagggccggttcaccatctcccgcgacaattccaagaacacgctgtatctgcaaatgaacagcctgcgtgccgaggacaccgcggtatattactgtgcgacagcggagcccttcttctcgtatganctactggggtcagggaagccctggtcaccgttctcnt

SEQ ID NO: 948 - DNA, 354 bp, Homo sapiens
ggggtgcagctgttggagtctgggggaggcttggtacagcctggggggtccctgcgtctctcctgtgcagcctccggattcatctttgcttggtatgatatggggtgggcccgccaggctccagggaagggtctagagtgggtctcaagtattgattggaggggtgatcagacatactacgcagactccgtgaagggccggttcaccatctcccgcgacaattccaagaacacgctgtatctgcaaatgaacagcctgcgtgccgaggacaccgcggtatattactgtgcgacagcggaggacgagccggggtatgactactggggtcagggaaccctggtcaccgtctcgagc

SEQ ID NO: 949 - DNA, 354 bp, Homo sapiens
ggggtgcagctgttggagtctgggggaggcttggtacagcctggggggtccctgcgtctctcctgtgcagcctccggattcatctttgcttggtatgatatggggtgggcccgccaggctccagggaagggtctagagtgggtctcaagtattgattggcagggtaatactacatactacgcagactccgtgaagggccggttcaccatctcccgcgacaattccaagaacacgctgtatctgcaaatgaacagcctgcgtgccgaggacaccgcggtatattactgtgcgacagcggaggacgagccggggtatgactactggggtcagggaaccctggtcaccgtctcgagc

SEQ ID NO: 950 - DNA, 354 bp, Homo sapiens
ggggtgcagctgttggagtctgggggaggcttggtacagcctggggggtccctgcgtctctcctgtgcagcctccggattcatctttgcttggtatgatatggggtgggtccgccaggctccagggaagggtctagagtgggtctcaagtattgattggacgggtaatgttacatactacgcagactccgtgaagggccggttcaccatctcccgcgacaattccaagaacacgctgtatctgcaaatgaacagcctgcgtgccgaggacaccgcggtatattactgtgcgacagcggaggacgagccggggtatgactactggggtcagggaaccctggtcaccgtctcgagc

SEQ ID NO: 951 - DNA, 354 bp, Homo sapiens
ggggtgcagctgttggagtctgggggaggcttggtacagcctggggggtccctgcgtctctcctgtgcagcctccggattcatctttgcttggtatgatatggggtgggcccgccaggctccagggaagggtctagagtgggtctcaagtattagtgatcgtggtaatgttacatactacgcagactccgtgaagggccggttcaccatctcccgcgacaattccaagaacacgctgtatctgcaaatgaacagcctgcgtgccgaggacaccgcggtatattactgtgcgacagcggaggacgagccggggtatgactactggggtcagggaaccctggtcaccgtctcgagc

SEQ ID NO: 952 - DNA, 354 bp, Homo sapiens
ggggtgcagctgttggagtctgggggaggcttggtacagcctggggggtccctgcgtctctcctgtgcagcctccggattcatctttgcttggtatgatatggggtgggcccgccaggctccagggaagggtctagagtgggtctcaagtattaatgattggggtaatgttacatactacgcagactccgtgaagggccggttcaccatctcccgcgacaattccaagaacacgctgtatctgcaaatgaacagcctgcgtgccgaggacaccgcggtatattactgtgcgacagcggaggacgagccggggtatgactactggggtcagggaaccctggtcaccgtctcgagc

SEQ ID NO: 953 - DNA, 354 bp, Homo sapiens
ggggtgcagctgttggagtctgggggaggcttggtacagcctggggggtccctgcgtctctcctgtgcagcctccggattcatctttgcttggtatgatatggggtgggtccgccaggctccagggaagggtctagagtgggtctcaagtattaatgatcgtggtaatgttacatactacgcagactccgtgaagggccggttcaccatctcccgcgacaattccaagaacacgctgtatctgcaaatgaacagcctgcgtgccgaggacaccgcggtatattactgtgcgacagcggaggacgagccggggtatgactactggggtcagggaaccctggtcaccgtctcgagc

SEQ ID NO: 954 - DNA, 354 bp, Homo sapiens
ggggtgcagctgttggagtctgggggaggcttggtacagcctggggggtccctgcgtctctcctgtgcagcctccggattcatctttgcttggtatgatatggggtgggcccgccaggctccagggaagggtctagagtgggtctcaagtattgattggaagggtggtaagacatactacgcagactccgtgaagggccggttcaccatctcccgcgacaattccaagaacacgctgtatctgcaaatgaacagcctgcgtgccgaggacaccgcggtatattactgtgcgacagcggaggacgagccggggtatgactactggggtcagggaaccctggtcaccgtctcgagc

SEQ ID NO: 955 - DNA, 354 bp, Homo sapiens
ggggtgcagctgttggagtctgggggaggcttggtacagcctggggggtccctgcgtctctcctgtgcagcctccggattcatctttgcttggtatgatatggggtgggcccgccaggctccagggaagggtctagagtgggtctcatctattaattggcatggtaatgttacatactacgcagactccgtgaagggccggttcaccatctcccgcgacaattccaagaacacgctgtatctgcaaatgaacagcctgcgtgccgaggacaccgcggtatattactgtgcgacagcggaggacgagccggggtatgactactggggtcagggaaccctggtcaccgtctcgagc

SEQ ID NO: 956 - DNA, 354 bp, Homo sapiens
ggggtgcagctgttggagtctgggggaggcttggtacagcctggggggtccctgcgtctctcctgtgcagcctccggattcatctttgcttggtatgatatggggtgggcccgccaggctccagggaagggtcttgagtgggtctcagttattaattggcatggtaatgttacatactacgcagactccgtgaagggccggttcaccatctcccgcgacaattccaagaacacgctgtatctgcaaatgaacagcctgcgtgccgaggacaccgcggtatattactgtgcgacagcggaggacgagccggggtatgactactggggtcagggaaccctggtcaccgtctcgagc

SEQ ID NO: 957 - DNA, 354 bp, Homo sapiens
ggggtgcagctgttggagtctgggggaggcttggtacagcctggggggtccctgcgtctctcctgtgcagcctccggattcatctttgcttggtatgatatggggtgggtccgcctggctccagggaagggtctagagtgggtctcaatgattaattggcatggtaatgttacatactacgcagactccgtgaagggccggttcaccatctcccgcgacaattccaagaacacgctgtatctgcaaatgaacagcctgcgtgccgaggacaccgcggtatattactgtgcgacagcggaggacgagccggggtatgactactggggtcagggaaccctggtcaccgtctcgagc

SEQ ID NO: 958 - DNA, 354 bp, Homo sapiens
ggggtgcagctgttggagtctgggggaggcttggtacagcctggggggtccctgcgtctctcctgtgcagcctccggattcatctttgcttggtatgatatggggtgggtccgccaggctccagggaagggtctagagtgggtctcaaagattaattggcatggtaatgttacatactacgcagactccgtgaagggccggttcaccgtctcccgcgacaattccaagaacacgctgtatctgcaaatgaacagcctgcgtgccgaggacaccgcggtatattactgtgcgacagcggaggacgagccggggtatgactactggggtcagggaaccctggtcaccgtctcgagc

SEQ ID NO: 959 - DNA, 354 bp, Homo sapiens
ggggtgcagctgttggagtctgggggaggcttggtacagcctggggggtccctgcgtctctcctgtgcagcctccggattcatctttgcttggtatgatatggggtgggtccgccaggctccagggaagcgtctagagtgggtctcagttattaattggcatggtaatgttacatactacgcagactccgtgaagggccggttcaccatctcccgcgacaattccaagaacacgctgtatctgcaaatgaacagcctgcgtgccgaggacaccgcggtatattactgtgcgacagcggaggacgagccggggtatgactactggggtcagggaaccctggtcaccgtctcgagc

SEQ ID NO: 960 - DNA, 354 bp, Homo sapiens
ggggtgcagctgttggagtctgggggaggcttggtacagcctggggggtccctgcgtctctcctgtgcagcctccggattcatctttgcttggtatgatatggggtgggtccgccaggctccagggaagggtctagagtgggtctcatcgattagttatcatggtaatgttacatactacgcagactccgtgaagggccggttcaccatctcccgcgacaattccaagaacacgctgtatctgcaaatgaacagcctgcgtgccgaggacaccgcggtatattactgtgcgacagcggaggacgagccggggtatgactactggggtcagggaaccctggtcaccgtctcgagc

SEQ ID NO: 961 - DNA, 354 bp, Homo sapiens
ggggtgcagctgttggagtctgggggaggcttggtacagcctgggggatccctgcgtctctcctgtgcagcctccggattcatctttgcttggtatgatatggggtgggcccgccaggctccagggaagggtctagagtgggtctcacatattgagagtcatggtaatgttacatactacgcagactccgtgaagggccggttcaccatctcccgcgacaattccaagaacacgctgtatctgcaaatgaacagcctgcgtgccgaggacaccgcggtatattactgtgcgacagcggaggacgagccggggtatgactactggggtcagggaaccctggtcaccgtctcgagc

SEQ ID NO: 962 - DNA, 354 bp, Homo sapiens
ggggtgcagctgttggagtctgggggaggcttggtacagcctggggggtccctgcgtctctcctgtgcagcctccggattcatctttgcttggtatgatatggggtgggcccgccaggctccagggaagggtctagagtgggtctcaaggattacgcatcatggtaatgttacatactacgcagactccgtgaagggccggttcaccatctcccgcgacaattccaagaacacgctgtatctgcaaatgaacagcctgcgtgccgaggacaccgcggtatattactgtgcgacagcggaggacgagccggggtatgactactggggtcagggaaccctggtcaccgtctcgagc

SEQ ID NO: 963 - DNA, 354 bp, Homo sapiens
ggggtgcagctgttggagtctgggggaggctcggtacagcctggggggtccctgcgtctctcctgtgcagcctccggattcatctttgcttggtatgatatggggtgggtccgccaggctccagggaagggtctagagtgggtctcaaagattgctgatcatggtaatgttacatactacgcagactccgtgaagggccggttcaccatctcccgcgacaattccaagaacacgctgtatctgcaaatgaacagcctgcgtgccgaggacaccgcggtatattactgtgcgacagcggaggacgagccggggtatgactactggggtcagggaaccctggtcaccgtctcgagc

SEQ ID NO: 964 - DNA, 354 bp, Homo sapiens
ggggtgcagctgttggagtctgggggaggcttggtacagcctggggggtccctgcgtctctcctgtgcagcctccggattcatctttgcttggtatgatatggggtgggtccgccaggctccagggaagggtctagagtgggtctcaaggattggtgctcatggtaatgttacatactacgcagactccgtgaagggccggttcaccatctcccgcgacaattccaagaacacgctgtatctgcaaatgaacagcctgcgtgccgaggacaccgcggtatattactgtgcgacagcggaggacgagccggggtatgactactggggtcagggaaccctggtcaccgtctcgagc

SEQ ID NO: 965 - DNA, 354 bp, Homo sapiens
ggggtgcagctgttggagtctgggggaggcttggtacagcctggggggtccctgcgtctctcctgtgcagcctccggattcatctttgcttggtatgatatggggtgggcccgccaggctccagggaagggtctagagtgggtctcacagattagttggcatggtaatgttacatactacgcagactccgtgaagggccggttcaccatctcccgcgacaattccaagaacacgctgtatctgcaaatgaacagcctgcgtgccgaggacaccgcggtatattactgtgcgacagcggaggacgagccggggtatgactactggggtcagggaaccctggtcaccgtctcgagc

SEQ ID NO: 966 - DNA, 354 bp, Homo sapiens
ggggtgcagttgttggagtccgggggaggcttggtacagcctggggggtccctgcgtctctcctgtgcagcctccggattcatctttgcttggtatgatatggggtgggtccgccaggctccagggaagggtctagagtgggtctcaactattaattggcatggtaatgttacatactacgcagactccgtgaagggccggttcaccatctcccgcgacaattccaagaacacgctgtatctgcaaatgaacagcctgcgtgccgaggacaccgcggtatattactgtgcgacagcggaggacgagccggggtatgactactggggtcagggaaccctggtcaccgtctcgagc

SEQ ID NO: 967 - protein, 118 aa, Homo sapiens
GVQLLESGGGLVQPGGSLRLSCAASGFTFAWYDMGWARQAPGKGLEWVSSIDDSGTQTYYADSVKGRFTISRDNSKNTLYLQMNSLRAEDTAVYYCATAERDDTFDYWGQGTLVTVSS

SEQ ID NO: 968 - protein, 118 aa, Homo sapiens
GVQLLESGGGLVQPGGSLRLSCAASGFTFAWYDMGWARQAPGKGLEWVSSIDDSGTQTYYADSVKGRFTISRDNSKKTLYLQMNSLRAEDTAVYYCATAERDDTFDYWGQGTLVTVSS

SEQ ID NO: 969 - protein, 118 aa, Homo sapiens
GVQLLESGGGLVQPGGSLRLSCAASGFTFAWYDMGWARQAPEKGLEWVSSINDYGTQTYYADSVKGRFTISRDNSNNTLYLQMNSLRAEDTAVYYCATAERDDTFDYWGQGTLVTVSS

SEQ ID NO: 970 - protein, 118 aa, Homo sapiens
GVQLLESGGGLVQPGGSLRLSCAASGFTFAWYDMGWARQAPGKGLEWVSSIDDSGTQTYYADSVKGRFTISRDNSKNTLYLQMNSLRAEDTAVYYCATAERDDTYDYWGQGTLVTVSS

SEQ ID NO: 971 - protein, 118 aa, Homo sapiens
GVQLLESGGGLVQPGGSLRLSCAASGFTFAWYDMGWARQAPGKGLEWVSSIDDSGTHTYYADSVNGRFTISRDNSKNTLYLQMNSLRAEDTAVYYCATAERDDTFDYWGQGTLVTVSS

SEQ ID NO: 972 - protein, 118 aa, Homo sapiens
GVQLLESGGGLVQPGGSLRLSCAASGFTFAWYDMGWARQAPGKGLEWVSSIDDSGTQTYYADSVMGRFTISRDNSKNTLYLQMNSLRAEDTAVYYCATAERDDTFDYWGQGTLVTVSS

SEQ ID NO: 973 - protein, 118 aa, Homo sapiens
GVKLLESGGGLVQPGGSLRLSCAASGFTFAWYDMGWARQAPGKGLEWVSSIDDSGTQTYYADSVKGRFTISRDNSKNTLYLQMNSLRAEDTAVYYCATAERDDTFDYWGQGTLVTVSS

SEQ ID NO: 974 - protein, 118 aa, Homo sapiens
GAQLLESGGGLVQPGGSLRLSCAASGFTFAWYDMGWARQAPGKGLEWVSSIDDSGTQTYYADSVKGRFTISRDNSKNTLYLQMNSLRAEDTAVYYCATAERDDTFDYWGQGTLVTVSS

SEQ ID NO: 975 - protein, 118 aa, Homo sapiens
GVQLLESGGGLVQPGGSLRLSCAASGFTFAWYDMGWARQAPGKGLEWVSKIKDYGLATYYADSVKGRFTISRDNSKNTLYLQMNSLRAEDTAVYYCATAERDDTFDYWGQGTLVTVSS

SEQ ID NO: 976 - protein, 118 aa, Homo sapiens
GVQLLESGGGLVQPGGSLRLSCAASGFTFAWYDMGWARQAPGKGLEWVSTIAWLGDGTYYADSVKGRFTISRDNSKNTLYLQMNSLRAEDTAVYYCATAERDDTFDYWGQGTLVTVSS

SEQ ID NO: 977 - protein, 118 aa, Homo sapiens
GVQLLESGGGLVQPGGSLRLSCAASGFTFAWYDMGWVRQAPGKGLEWVSTIDWVGLATYYADSVKGRFTISRDNSKNTLYLQMNSLRAEDTAVYYCATAERDDTFDYWGQGTLVTVSS

SEQ ID NO: 978 - protein, 118 aa, Homo sapiens
GVQLLESGGGLVQPGGSLRLSCAASGFTFAWYDMGWARQAPGKGLEWVSVIPWVGPLTYYADSVKGRFTISRDNSKNTLYLQMNSLRAEDTAVYYCATAERDDTFDYWGQGTLVTVSS

SEQ ID NO: 979 - protein, 118 aa, Homo sapiens
GVQLLESGGGLVQPGGSLRLSCAASGFTFAWYDMGWARQAPGKGLEWVSTITDWGLSTYYADSVKGRFTISRDNSKNTLYLQMNSLRAEDTAVYYCATAERDDTFDYWGQGTLVTVSS

SEQ ID NO: 980 - protein, 118 aa, Homo sapiens
GVQLLESGGGLVQPGGSLRLSCAASGFTFAWYDMGWVRQAPGKGLEWVSEINWYGVVTYYADSVKGRFTISRDNSKNTLYLQMNSLRAEDTAVYYCATAERDDTFDYWGQGTLVTVSS

SEQ ID NO: 981 - protein, 118 aa, Homo sapiens
GVQLLESGGGLVQPGGSLRLSCAASGFTFAWYDMGWARQAPGKGLEWVSIITDSGWGTYYADSVKGRFTISRDNSKNTLYLQMNSLRAEDTAVYYCATAERDDTFDYWGQGTLVTVSS

SEQ ID NO: 982 - protein, 118 aa, Homo sapiens
GVQLLESGGGLVQPGGSLRLSCAASGFTFAWYDMGWARQAPGKGLEWVSRIKDWGWATYYADSVKGRFTISRDNSKNTLYLQMNSLRAEDTAVYYCATAERDDTFDYWGQGTLVTVLE

SEQ ID NO: 983 - protein, 118 aa, Homo sapiens
GVQLLESGGGLVQPGGSLRLSCAASGFTFAWYDMGWARQAPGKGLEWVSLISDLGYATYYADSVKGRFTISRDNSKNTLYLQMNSLRAEDTAVYYCATAERDDTFDYWGQGTLVTVSS

SEQ ID NO: 984 - protein, 118 aa, Homo sapiens
GVQLLESGGGLVQPGGSLRLSCAASGFTFAWYDMGWARQAPGKGLEWVSRINDIGYATYYADSVKGRFTISRDNSKNTLYLQMNSLRAEDTAVYYCATAERDDTFDYWGQGTLVTVSS

SEQ ID NO: 985 - protein, 118 aa, Homo sapiens
GVQLLESGGGLVQPGGSLRLSCAASGFTFAWYDMGWARQAPGKGLEWVSKITWLGNITYYADSVKGRFTISRDNSKNTLYLQMNSLRAEDTAVYYCATAERDDTFDYWGQGTLVTVSS

SEQ ID NO: 986 - protein, 118 aa, Homo sapiens
GVQLLESGGGLVQPGGSLRLSCAASGFTFAWYDMGWARQAPGKGLEWVSVIKWVGGSTYYADSVKGRFTISRDNSKNTLYLQMNSLRAEDTAVYYCATAERDDTFDYWGQGTLVTVSS

SEQ ID NO: 987 - protein, 118 aa, Homo sapiens
  VARIANT 28, 36, 55, 89, 110: Xaa = Any Amino Acid
WVQLLESGGGLVQPGGSLRLSCAASGFXFAWYYMGXARQAPGKGLEWVSVIRDDXRGTYYADSVKGRFTISRDNSKNTLNLQMNSLRAXDTAVYYCATAERDDTFDYWGXGTLVTVSS

SEQ ID NO: 988 - protein, 118 aa, Homo sapiens
GVQLLESGGGLVQPGGSLRLSCAASGFTFAWYDMGWVRQAPGKGLEWVSVIPWIGPPTYYADSVKGRFTISRDNSKNTLYLQMNSLRAEDTAVYYCATAERDDTFDYWGQGTLVTVSS

SEQ ID NO: 989 - protein, 118 aa, Homo sapiens
GVQLLESGGGLVQPGGSLRLSCAASGFTFAWYDMGWARQAPGKGLEWVSRITDWGYATYYADSVKGRFTISRDNSKNTLYLQMNSLRAEDTAVYYCATAERDDTFDYWGQGTLVTVSS

SEQ ID NO: 990 - protein, 118 aa, Homo sapiens
GVQLLESGGGLVQPGGSLRLSCAASGFTFAWYDMGWARQAPGKGLEWVSEIWDNGRFTYYADSVKGRFTISRDNSKNTLYLQMNSLRAEDTAVYYCATAERDDTFDYWGQGTLVTVSS

SEQ ID NO: 991 - protein, 118 aa, Homo sapiens
GVQLLESGGGLVQPGGSLRLSCAASGFTFAWYDMGWARQAPGKGLEWVSSIDDSGTQTYYADSVKGRFTISRDNSKNTLYLEMNSLRAEDTAVYYCATAERDDTYDYWGQGTLVTVSS

SEQ ID NO: 992 - protein, 118 aa, Homo sapiens
GVQLLESGGGLVQPGGSLRLSCAASGFTFAWYDMGWARQAPGKGLEWVTSIDDSGTQTYYADSVKGRFTISRDNSKNTLYLQMNSLRAEDTAVYYCATAERDDTYDYWGQGTLVTVSS

SEQ ID NO: 993 - protein, 118 aa, Homo sapiens
GVQLLESGGGLVQPGGSLRLSCAASGFTFAWYDMGWARQAPGKGLEWVSSIDDSGTHTYYADSVKGRFTISRDNSKNTLYLQMNSLRAEDTAVYYCATAERDDTYDYWGQGTLVTVSS

SEQ ID NO: 994 - protein, 118 aa, Homo sapiens
GVQLLESGGGLVQPGGSLRLSCAASGFTFAWYDMGWARQAPGKGLEWVSSIDDFGTHTYYADSVKGRFTISRDNSKNTLYLQMSSLRAEDTAVYYCATAERDDTFDFWGQGTLVTVSS

SEQ ID NO: 995 - protein, 118 aa, Homo sapiens
GVQLLESGGGLVQPGGSLRLSCAASGFTFAWYDMGWARQAPGKGLEWVSSIDDSGTQTYYADSVKGRFTISRDNSKNMLYLQMNSLRAEDTAVYYCATAERDDTYDYWGQGTLVTVSS

SEQ ID NO: 996 - protein, 118 aa, Homo sapiens
GVQLLESGGGLVQPGGSLRLSCAASGFTFAWYDMGWARQAPGKGLEWVSSIDDSGTQTYYADSVKGRFTISRDNSKNTLYLQMNSLRAEDTAVYYCAAAEWDDTFDYRGQGTLVIVSS

SEQ ID NO: 997 - protein, 118 aa, Homo sapiens
GVQLLESGGGLVQPGGSLRLSCAASGFTFAWYDMGWARQAPGKGLEWVSSIDDFGTHTYYADSVKGRFTIYRDNSKNTLYLQMNSLRAEDTAVYYCATAERDDTFDYWGQGTLVTVSS

SEQ ID NO: 998 - protein, 118 aa, Homo sapiens
GVQLLESGGGLVQPGGSLRLSCAASGFTFAWYDMGWARQAPGKGLEWVSSIDDFGTHTYYADSVKDRFTISRDNSKNTLYLQMNNLRAEDTAVYYCATAERDDTFDYWGQGTLVTVSS

SEQ ID NO: 999 - protein, 118 aa, Homo sapiens
GVQLLESGGGLVQPGGSLRLSCAASGFTFAWYDMGWARQAPGKGLEWVSSIDDFGTHTYYADSVKGRFTISRDNSKNTLYLQMNSLRAEDTAVYYCATAERDDTFDYWGQGTLVTVSS

SEQ ID NO: 1000 - protein, 118 aa, Homo sapiens
GVQLLESGGGLVQPGGSLRLSCAASGFTFAWYDMGWARQAPGKGLEWVSSIDDSGTQTYYADSVKGRFTISRDNYKNTLYLQMNSLRAEDTAVYYCATAERDDTFDYWGKGTLVTVSS

SEQ ID NO: 1001 - protein, 118 aa, Homo sapiens
GVQLLESGGGLVQPGGSLRLSCAASGFTFAWYDMGWARQAPGKGLEWVSSIDDSGTQTYYADSVKGRFTISRDNSKNTLYLQMNSLRAEDTAVYYCATAEMDDTYDYWGQGTLVTVSS

SEQ ID NO: 1002 - protein, 118 aa, Homo sapiens
GVQLLESGGGLVQPGGSLRLSCAASGFTFAWYDMGWARQAPGKGLEWVSSIDDSGTLTYYADSVKGRFTISRDNSKNTLYLQMNSLRAEDTAVYYCATAERDDTYDYWGQGTLVTVSS

SEQ ID NO: 1003 - protein, 118 aa, Homo sapiens
GVQLLESGGGLVQPGRSLRLSCAASGFTFAWYDMGWARQAPGKGLEWVSSIDDSGTQTYYADSVKGRFTISRDNSKNTLYLQMNSLRADDTAVYYCATAEREDTYDYWGQGTLVTVSS

SEQ ID NO: 1004 - protein, 118 aa, Homo sapiens
GVQLLESGGGLVQPGGSLRLSCAASGFIFAWYDMGWARQAPGKGLEWVSSIDDSGTQTYYADSVKGRFTISRDNSKNTLYLQMNSLRAEDTAVYYCATAERDDTYDYWGQGTLVTVSS

SEQ ID NO: 1005 - protein, 118 aa, Homo sapiens
GVQLLESGGGLVQPGGSLRLSCAASGFTFAWYDMGWARQAPGKGLEWVSSIDDSGTQTYYADSVKGRFTITRDNSKNTLYLQMNSLRAEDTAVYYCATAERDDTFDYWGQGTLVTVSS

SEQ ID NO: 1006 - protein, 118 aa, Homo sapiens
GVQLLESGGGLVQPGGSLRLSCAASGFIFAWYDMGWARQAPGKGLEWVSSIDDSGTQTYYADSVKGRFTISRDNSKNTLYLQMNSLRAEDTAVYYCATAERDDTFDYWGQGTLVTVSS

SEQ ID NO: 1007 - protein, 118 aa, Homo sapiens
GVQLLESGGGLVQPGGSLRLTCAASGFTFAWYDMGWARQAPGKGLEWVSSIDDSGTQTYYADSVKGRFTISRDNSKNTLYLQMNSLRAEDTAVYYCATAERDDTYDYWGQGTLVTVSS

SEQ ID NO: 1008 - protein, 118 aa, Homo sapiens
GVQLLESGGGLVQPGGSLRLSCAASGFTFAWYDMGWARQAPGKGLEWVSSIDDSGTRTYYADSVKGRFTISRDNSKNTLYLQMNSLRAEDTAVYYCATAERDDTFDYWGQGTLVTVSS

SEQ ID NO: 1009 - protein, 118 aa, Homo sapiens; identical to SEQ ID NO: 970

SEQ ID NO: 1010 - protein, 118 aa, Homo sapiens
GVRLLESGGGLVQPGGSLRLSCAASGFTFAWYDMGWARQAPGKGLEWVSSIDDSGTQTYYADSVKGRFTISRDNSKNTLYLQMNSLRAEDTAVYYCATAERDDTYDYWGQGTLVTVSS

SEQ ID NO: 1011 - protein, 118 aa, Homo sapiens
GVQLLESGGGLVQPGGSLRLSCAASGFTFAWYDMGWARQAPGKGLEWVSSIDDSGTQTYYADSVKGRFTISRDNSKNRLYLQMNSLRAEDTAVYYCATAERDDTYDYWGQGTLVTVSS

SEQ ID NO: 1012 - protein, 118 aa, Homo sapiens
GVQLLESGGGLVQPGGSLRLSCAASGFTFAWYDMGWARQAPGKDLEWVSSIDDSGTQTYYADSVKGRFTISRDNSKNTLYLQMNSLRAEDTAVYYCATAERDDTYDYWGQGTLVTVSS

SEQ ID NO: 1013 - protein, 118 aa, Homo sapiens
GVQLLESGGGLVQPGGSLRLSCAASGFTFAWYDMGWARQAPGKGLEWVSSIDDSGTRTYYADSVKGRFTISRDNSKNTLYLQMNSLRAEDTAVYYCATAERDDTYDYWGQGTLVTVSS

SEQ ID NO: 1014 - protein, 118 aa, Homo sapiens
GVQLLESGGGLVQPGGSLRLSCAASGFTFAWYDMGWARQAPGKGLEWVSTIDDSGTQTYYADSVKGRFTISRDNSKNTLYLQMNSLRAEDTAVYYCATAELEDTFDYWGQGTLVTVSS

SEQ ID NO: 1015 - protein, 118 aa, Homo sapiens
  VARIANT 55, 75: Xaa = Any Amino Acid
GVQLLESGGGLVQPGGSLRLSCAASGFTFAWYDMGWARQAPGKGLEWVSSIDDSXTQTYYADSVKGRFTISRDNXKNTLYLQMNSLRAEDTAVYYCATAERDDTFDYWGQGTLVTVSS

SEQ ID NO: 1016 - protein, 118 aa, Homo sapiens
GVQLLESGGGLVQPGGSLRLSCAASGFTFAWYDMGWARQAPGKGLEWVSSIDDSGTRTYYAGSVKGRFTISRDNSKNTLYLQMNSLRAEDTAVYYCATAERDDTYDYWGQGTLVTVSS

SEQ ID NO: 1017 - protein, 118 aa, Homo sapiens
GVQLLESGGGLVQPGGSLRLSCAASGFTFAWYDMGWARQAPGKGLEWVSSIDDSGRQTYYADSVKGRFTISRDNSKNTLYLQMNSLRAEDTAVYYCATAERDDTYDYWGQGTLVTVSS

SEQ ID NO: 1018 - protein, 118 aa, Homo sapiens
GVQLLESGGGLVQPGGSLRLSCAASGFTFAWYDMGWARQAPGKGLEWVSSIDDSGTQTYYADSVKGRFTISRDNSKNMLYLQMNSLRAEDTAVYYCATAERDDTFDYWGQGTLVTVSS

SEQ ID NO: 1019 - protein, 118 aa, Homo sapiens
GVQLLESGGGLVQPGGSLRLSCAASGFTFAWYDMGWARQAPGKGLEWVSSIDDSGTQTYYADSVKGRFTISRDNSKNKLYLQMNSLRAEDTAVYYCATAERDDTYDYWGQGTLVTVSS

SEQ ID NO: 1020 - protein, 118 aa, Homo sapiens
GVQLLESGGGLVQPGGSLRLSCAASGFTFVWYDMGWARQTPGKGLEWVSSIDDSGTQTYYADSVKGRFTISRDNSKNTLYLQMNSLRAEDTAVYYCATAESDDTYDYWGQGTLVTVSS

SEQ ID NO: 1021 - protein, 118 aa, Homo sapiens
GVQLLESGGGLVQPGGSLRLSCAASGFTFAWYDMGWARQAPGKGLEWVSSIDDSGTQTYYADSVKGRFTISRDNSKNTLYLQMNSLRAEDTAVYYCATAERDDIFDYWGQGTLVTVSS

SEQ ID NO: 1022 - protein, 118 aa, Homo sapiens
GVQLLESGGGLVQPGGSLRLSCAASGFTFAWYDMGWARQAPGKGLEWVSSIDDSGTQTYYADSVKGRFTISRDNSKNTLYLQMKSLRAEDTAVYYCATAERDDTSDYWGQGTLVTVSS

SEQ ID NO: 1023 - protein, 118 aa, Homo sapiens
GVQLLESGGGLVQPGGSLRLSCAASGFTFAWYDMGWVRQAPEKGLEWVSSIDDSGTQTYYADSVKGRFTISRDNSKNTLYLQMNSLRAEDTAVYYCATAEREDSYDYWGQGTLVTVSS

SEQ ID NO: 1024 - protein, 118 aa, Homo sapiens
GVQLLESGGGLVQPGGSLRLSCAASGFTFAWYDMGWARQAPGKGLEWVSVIDWHGTVTYYADSVKGRFTISRDNSKNTLYLQMNSLRAEDTAVYYCATAERDDTFDYWGQGTLVTVSS

SEQ ID NO: 1025 - protein, 118 aa, Homo sapiens
GVQLLESGGGLVQPGGSLRLSCAASGFTFAWYDMGWARQAPGKGLEWVSIITDTGGRTYYADSVKGRFTISRDNSKNTLYLQMNSLRAEDTAVYYCATAERDDTFDYWGQGTLVTVSS

SEQ ID NO: 1026 - protein, 118 aa, Homo sapiens
GVQLLESGGGLVQPGGSLRLSCAASGFTFAWYDMGWARQAPGKGLEWVSTIDWRGTITYYADSVKGRFTISRDNSKNTLYLQMNSLRAEDTAVYYCATAERDDTFDYWGQGTLVTVSS

SEQ ID NO: 1027 - protein, 118 aa, Homo sapiens
GVQLLESGGGLVQPGGSLRLSCAASGFTFAWYDMGWARQAPGKGLEWVSSIDWHGDVTYYADSVKGRFTISRDNSKNTLYLQMNSLRAEDTAVYYCATAERDDTFDYWGQGTLVTVSS

SEQ ID NO: 1028 - protein, 118 aa, Homo sapiens
GVQLLESGGGLVQPGGSLRLSCAASGFTFAWYDMGWARQAPGKGLEWVSTIDWHGSETYYADSVKGRFTISRDNSKNTLYLQMNSLRAEDTAVYYCATAERDDTFDYWGQGTLVTVSS

SEQ ID NO: 1029 - protein, 118 aa, Homo sapiens
GVQLLESGGGLVQPGGSLRLSCAASGFTFAWYDMGWARQAPGKGLEWVSTISWLGTHTYYADSVKGRFTISRDNSKNTLYLQMNSLRAEDTAVYYCATAERDDTFDYWGQGTLVTVSS

SEQ ID NO: 1030 - protein, 118 aa, Homo sapiens
GVQLLESGGGLVQPGGSLRLSCAASGFTFAWYDMGWARQAPGKGLEWVSSIDWHGTSTYYADSVKGRFTISRDNSKNTLYLQMNSLRAEDTAVYYCATAERDDTFDYWGQGTLVTVSS

SEQ ID NO: 1031 - protein, 118 aa, Homo sapiens
GVQLLESGGGLVQPGGSLRLSCAASGFTFAWYDMGWARQAPGKGLEWVSTIDWHGVVTYYADSVKGRFTISRDNSKNTLYLQMNSLRAEDTAVYYCATAERDDTFDYWGQGTLVTVSS

SEQ ID NO: 1032 - protein, 118 aa, Homo sapiens
GVQLLESGGGLVQPGGSLRLSCAASGFTFAWYDMGWARQAPGKGLEWVSSIDWHGNVTYYADSVKGRFTISRDNSKNTLYLQMNSLRAEDTAVYYCATAERDDTFDYWGQGTLVTVSS

SEQ ID NO: 1033 - protein, 118 aa, Homo sapiens
GVQLLESGGGLVQPGGSLRLSCAASGFTFAWYDMGWVRQAPGKGLEWVSQIDWHGLATYYADSVKGRFTISRDNSKNTLYLQMNSLRAEDTAVYYCATAERDDTFDYWGQGTLVTVSS

SEQ ID NO: 1034 - protein, 118 aa, Homo sapiens
GVQLLESGGGLVQPGGSLRLSCAASGFTFAWYDMGWVRQAPGKGLEWVSSIDWHGNKTYYADSVKGRFTISRDNSKNTLYLQMNSLRAEDTAVYYCATAERDDTFDYWGQGTLVTVSS

SEQ ID NO: 1035 - protein, 118 aa, Homo sapiens
GVQLLESGGGLVQPGGSLRLSCAASGFTFAWYDMGWVRQAPGKGLEWVSSIDWHGRPTYYADSVKGRFTISRDNSKNTLYLQMNSLRAEDTAVYYCATAERDDTFDYWGQGTLVTVSS

SEQ ID NO: 1036 - protein, 118 aa, Homo sapiens
GVQLLESGGGLVQPGGSLRLSCAASGFTFAWYDMGWVRQAPGKGLEWVSKISDLGCPTYYADSVKGRFTISRDNSKNTLYLQMNSLRAEDTAVYYCATAERDDTFDYWGQGTLVTVSS

SEQ ID NO: 1037 - protein, 118 aa, Homo sapiens
GVQLLESGGGVVQPGGSLRLSCAASGFTFAWYDMGWARQAPGKGLEWVSKITDYGFATYYADSVKGRFTVSRDNSKNTLYLQMNSLRAEDTAVYYCATAERDDTFDYWGQGTLVTVSS

SEQ ID NO: 1038 - protein, 118 aa, Homo sapiens
GVQLLESGGGLVQPGGSLRLSCAASGFTFAWYDMGWARQAPGKGLEWVSKITDLGYATYYADSVKGRFTISRDNSKNTLYLQMNSLRAEDTAVYYCATAERDDTFDYWGQGTLVTVSS

SEQ ID NO: 1039 - protein, 118 aa, Homo sapiens
GVQLLESGGGLVQPGGSLRLSCAASGFTFAWYDMGWARQAPGKGLEWVSRIEDNGRHTYYADSVKGRFTISRDNSKNTLYLQMNSLRAEDTAVYYCATAERDDTFDYWGQGTLVTVSS

SEQ ID NO: 1040 - protein, 118 aa, Homo sapiens
GVQLLESGGGLVQPGGSLRLSCAASGFTFAWYDMGWARQAPGKGLEWVSTIDDLGRHTYYADSVKGRFTISRDNSKNTLYLQMNSLRAEDTAVYYCATAERDDTFDYWGQGTLVTVSS

SEQ ID NO: 1041 - protein, 118 aa, Homo sapiens
GVQLLESGGGLVQPGGSLRLSCAASGFTFAWYDMGWARQAPGKGLEWVSTISWLGGNTYYADSVKGRFTISRDNSKNTLYLQMNSLRAEDTAVYYCATAERDDTFDYWGQGTLVTVSS

SEQ ID NO: 1042 - protein, 118 aa, Homo sapiens
GVQLLESGGGLVQPGGSLRLSCAASGFTFAWYDMGWVRQAPGKGLEWVSTITDLGYATYYADSVKGRFTISRDNSKNTLYLQMNSLRAEDTAVYYCATAERDDTFDYWGQGTLVTVSS

SEQ ID NO: 1043 - protein, 118 aa, Homo sapiens
GVQLLESGGGLVQPGGSLRLSCAASGFTFAWYDMGWARQAPGKGLEWVSSIDDSGTQTYYADSVRGRFTISRDNSKNTLYLQMNSLRAEDTAVYYCATAERDDTYDYWGQGTLVTVSS

SEQ ID NO: 1044 - protein, 118 aa, Homo sapiens
GVQLLESGGGLVQPGGSLRLSCAASGFTFAWYDMGWARQAPGKGLEWVSSIDDSGTQAYYADSVKGRFTISRDNSKNTLYLQMNSLRAEDTAVYYCATAERDDTYDYWGQGTLVTVSS

SEQ ID NO: 1045 - protein, 118 aa, Homo sapiens
GVQLLESGGGLVQPGGSLRLSCAASGFTFAWYDMGWARQAPGKGLEWVSSIDDSGMRTYYADSVKGRFTISRDNSKNTLYLQMDSLRAEDTAVYYCATAERDDTFDYWGQGTLVTVSS

SEQ ID NO: 1046 - protein, 118 aa, Homo sapiens
GVQLLESGGGLVQPGGSMRLSCAASGFTFAWYDMGWARQAPGKGLEWVSSIDDSGTQTYYADSVKGRFTISRDNSKNTLYLQMNSLRAEDTAVYYCATAERDDTYDYWGQGTLVTVSS

SEQ ID NO: 1047 - protein, 118 aa, Homo sapiens
GVQLLESGGGLIQPGGSLRLSCAASGFTFAWYDMGWARQAPGKGLEWVSSIDDSGTQTYYADSVKGRFTISRDNSKNTLYLQMNSLRAEDTAVYYCATAERDDTYDYWGQGTLVTVSS

SEQ ID NO: 1048 - protein, 118 aa, Homo sapiens
GVQLLESGGGLVQPGGSLRLSCAASGFTFAWYDMGWARQAPGKGLEWVSSIDDSGTQTYYADSVKGRFTISRDNFKNTLYLQMNSLRAEDTAVYYCATAERDDTYDYWGQGTLVTVSS

SEQ ID NO: 1049 - protein, 118 aa, Homo sapiens
GVQLLESGGGLVQPGGSLRLSCAASGFTFAWYDMGWARQAPGKGLEWVSSIDDSGTQTYYADSVKGRFTISRDNSKNTLYLQMSSLRAEDTAVYYCATAERDDTYDYWGQGTLVTVSS

SEQ ID NO: 1050 - protein, 118 aa, Homo sapiens
GVQLLESGGGLVQPGGSLRLSCAASGFTFAWYDMGWARQAPGKGLEWVSSIDDSGTQTYYADSVKGRFTISRDNSKNTLYLQMDSLRAEDTAVYYCATAERDDTYDYWGQGTLVTVSS

SEQ ID NO: 1051 - protein, 118 aa, Homo sapiens
GVQLLESGGGLVQPGGSLRLSCAASGFTFAWYDMGWARQAPGKGLEWVSSIDDSGMQTYYADSVKGRFTISRDNSKNTLYLQMNSLRTEDTAVYYCATAERDDTFDYWGQGTLVTVSS

SEQ ID NO: 1052 - protein, 118 aa, Homo sapiens
GVQLLESGGGLVQPGGSLRLSCAASGFTFAWYDMGWARQAPGKGLEWVSSIDDSGTHTYYADSVKGRFTISRDNSKNTLYLQMNSLRAEDTAVYYCATAERDDTFDYWGQGTLVTVSS

SEQ ID NO: 1053 - protein, 118 aa, Homo sapiens
GVQLLESGGGLVQPGGSLRLSCAASGFIFAWYDMGWARQAPGKGLEWVSSIDWHGNVTYYADSVKGRFTISRDNSKNTLYLQMNSLRAEDTAVYYCATAERDDTFDYWGQGTLVTVSS

SEQ ID NO: 1054 - protein, 118 aa, Homo sapiens
GVQLLESGGGLVQPGGSLRLSCAASGFIFAWYDMGWARQAPGKGLEWVSSIDWHGNVTYYADSVKGRFTISRDNSKNTLYLQMNSLRAEDTAVYYCATAERDDTYDYWGQGTLVTVSS

SEQ ID NO: 1055 - protein, 118 aa, Homo sapiens
GVKLLESGGGLVQPGGSLRLSCAASGFTFAWYDMGWARQAPGKGLEWVSSIDWHGNVTYYADSVKGRFTISRDNSKNTLYLQMNSLRAEDTAVYYCATAERDDTFDYWGQGTLVTVSS

SEQ ID NO: 1056 - protein, 118 aa, Homo sapiens
GVQLLESGGGLVQPGGSLRLSCAASGFTFAWYDMGWVRQAPGKGLEWVSSIDWHGNVTYYADSVKGRFTISRDNSKNTLYLQMNSLRAEDTAVYYCATAERDDTFDYWGQGTLVTVSS

SEQ ID NO: 1057 - protein, 118 aa, Homo sapiens
GVQLLESGGGLVQPGGSLRLSCAASGFTFAWYDMGWARQAPGKGLEWVSHIDWHGNHTYYADSVKGRFTISRDNSKNTLYLQMNSLRAEDTAVYYCATAERDDTFDYWGQGTLVTVSS

SEQ ID NO: 1058 - protein, 118 aa, Homo sapiens
GVQLLESGGGLVQPGGSLRLSCAASGFTFAWYDMGWARQAPGRGLEWVSTINWHGNNTYYADSVKGRFTISRDNSKNTLYLQMNSLRAEDTAVYYCATAERDDTFDYWGQGTLVTVSS

SEQ ID NO: 1059 - protein, 118 aa, Homo sapiens
GVQLLESGGGLVQPGGSLRLSCAASGFTFAWYDMGWARQAPGKGLEWVSTINWHGAVSYYADSVKGRFTISRDNSKNTLYLQMNSLRAEDTAVYYCATAERDDTFDYWGQGTLVTVSS

SEQ ID NO: 1060 - protein, 118 aa, Homo sapiens
GVQLLESGGGLVQPGGSLRLSCAASGFTFAWYDMGWARQAPGKGLEWVSLIDWMGHVTYYADSVKGRFTISRDNSKNTLYLQMNSLRAEDTAVYYCATAERDDTFDYWGQGTLVTVSS

SEQ ID NO: 1061 - protein, 118 aa, Homo sapiens
GVQLLESGGGLVQPGGSLRLSCAASGFTFAWYDMGWARQAPGKGLEWVSKIDWHGSVTYYADSVKGRFTISRDNSKNTLYLQMNSLRAEDTAVYYCATAEGDDTFDYWGQGTLVTVSS

SEQ ID NO: 1062 - protein, 118 aa, Homo sapiens
GVQLLESGGGLVQPGGSLRLSCAASGFTFAWYDMGWARQAPGKGLEWVSTIDWHGEPTYYADSVKGRFTISRDNSKNTLYLQMNSLRAEDTAVYYCATAERDDTFDYWGQGTLVTVSS

SEQ ID NO: 1063 - protein, 118 aa, Homo sapiens
GVQLLESGGGLVQPGGSLRLSCAASGFTFAWYDMGWARQAPGKGLEWVSTIDWHGQLTYYADSVKGRFTISRDNSKNTLYLQMNSLRAEDTAVYYCATAERDDTFDYWGQGTLVTVSS

SEQ ID NO: 1064 - protein, 118 aa, Homo sapiens
GVQLLESGGGLVQPGGSLRLSCAASGFTFAWYDMGWARQAPGKGLEWVSTIDWLGSVTYYADSVKGRFTISRDNSKNTLYLQMNSLRAEDTAVYYCATAERDDTFDYWGQGTLVTVSS

SEQ ID NO: 1065 - protein, 118 aa, Homo sapiens
GVQLLESGGGLVQPGGSLRLSCAASGFTFAWYDMGWARQAPGKGLEWVSAIDDLGRRTYYADSVKGRFTISRDNSKNTLYLQMNSLRAEDTAVYYCATAERDDTFDYWGQGTLVTVSS

SEQ ID NO: 1066 - protein, 118 aa, Homo sapiens
GVQLLESGGGLVQPGGSLRLSCAASGFTFAWYDMGWARQAPGKGLEWVSSIDDRGRYTYYADSVKGRFTISRDNSKNTLYLQMNSLRAEDTAVYYCATAERDDTFDYWGQGTLVTVSS

SEQ ID NO: 1067 - protein, 118 aa, Homo sapiens
GVQLLESGGGLVQPGGSLRLSCAASGFTFAWYDMGWARQAPGKGLEWVSVISDYGRGTYYADSVKGRFTISRDNSKNTLYLQMNSLRAEDTAVYYCATAEGDDTFDYWGQGTLVTVSS

SEQ ID NO: 1068 - protein, 118 aa, Homo sapiens
GVQLLESGGGLVQPGGSLRLSCAASGFTFAWYDMGWARQAPGKGLEWVSSIDDSGRYTYYADSVKGRFTISRDNSKNTLYLQMNSLRAEDTAVYYCATAERDDTFDYWGQGTLVTVSS

SEQ ID NO: 1069 - protein, 118 aa, Homo sapiens
GVQLLESGGGLVQPGGSLRLSCAASGFTFAWYDMGWARQAPGKGLEWVSVIDDVGRGTYYADSVKGRFTISRDNSKNTLYLQMNSLRAEDTAVYYCATAERDDTFDYWGQGTLVTVSS

SEQ ID NO: 1070 - protein, 118 aa, Homo sapiens
  VARIANT 108, 113: Xaa = Any Amino Acid
GVQLLESGGGLVQPGGSLRLSCAASGFIFAWYDMGWARQAPGKGLEWVSSIDWHGNVTYYADSVKGRFTISRDNSKNTLYLQMNSLRAEDTAVYYCATAEITKGYELXGVREXLVTVL

SEQ ID NO: 1071 - protein, 118 aa, Homo sapiens
  VARIANT 118: Xaa = Any Amino Acid
GVQLLESGGGLVQPGGSLRLSCAASGFIFAWYDMGWARQAPGKGLEWVSSIDWHGNVTYYADSVKGRFTISRDNSKNTLYLQMNSLRAEDTAVYYCATAETFLGYDYWGQGTLVTVLX

SEQ ID NO: 1072 - protein, 118 aa, Homo sapiens
  VARIANT 118: Xaa = Any Amino Acid
GVQLLESGGGLVQPGGSLRLSCAASGFIFAWYDMGWARQAPGKGLEWVSSIDWHGNVTYYADSVKGRFTISRDNSKNTLYLQMNSLRAEDTAVYYCATAEELAGYDYWGQGTLVTVYX

SEQ ID NO: 1073 - protein, 118 aa, Homo sapiens
  VARIANT 112, 118: Xaa = Any Amino Acid
GVQLLESGGGLVQPGGSLRLSCAASGFIFAWYDMGWARQAPGKGLEWVSSIDWHGNVTYYADSVKGRFTISRDNSKNTLYLQMNSLRAEDTAVYYCATAEREVGYDYWGQGXPGHRSX

SEQ ID NO: 1074 - protein, 118 aa, Homo sapiens
  VARIANT 118: Xaa = Any Amino Acid
GVQLLESGGGLVQPGGSLRLSCAASGFIFAWYDMGWARQAPGKGLEWVSSIDWHGNVTYYADSVKGRFTISRDNSKNTLYLQMNSLRAEDTAVYYCATAEQLAGYDYWGQGTLVTVYX

SEQ ID NO: 1075 - protein, 118 aa, Homo sapiens
  VARIANT 117, 118: Xaa = Any Amino Acid
GVQLLESGGGLVQPGGSLRLSCAASGFIFAWYDMGWARQAPGKGLEWVSSIDWHGNVTYYADSVKGRFTISRDNSKNTLYLQMNSLRAEDTAVYYCATAEHDELYDYWGQGTLVTVXX

SEQ ID NO: 1076 - protein, 118 aa, Homo sapiens
  VARIANT 117, 118: Xaa = Any Amino Acid
GVQLLESGGGLVQPGGSLRLSCAASGFIFAWYDMGWARQAPGKGLEWVSSIDWHGNVTYYADSVKGRFTISRDNSKNTLYLQMNSLRAEDTAVYYCATAERTPTYDYWGQGTLVTVXX

SEQ ID NO: 1077 - protein, 118 aa, Homo sapiens
  VARIANT 117: Xaa = Any Amino Acid
GVQLLESGGGLVQPGGSLRLSCAASGFIFAWYDMGWARQAPGKGLEWVSSIDWHGNVTYYADSVKGRFTISRDNSKNTLYLQMNSLRAEDTAVYYCATAEALKGYDYWGQGTLVTVXV

SEQ ID NO: 1078 - protein, 118 aa, Homo sapiens
  VARIANT 116, 117: Xaa = Any Amino Acid
GVQLLESGGGLVQPGGSLRLSCAASGFIFAWYDMGWARQAPGKGLEWVSSIDWHGNVTYYADSVKGRFTISRDNSKNTLYLQMNSLRAEDTAVYYCATAETISGYDYWGQGTLVTXXL

SEQ ID NO: 1079 - protein, 118 aa, Homo sapiens
GVQLLESGGGLVQPGGSLRLSCAASGFIFAWYDMGWARQAPGKGLEWVSSIDWHGNVTYYADSVKGRFTISRDNSKNTLYLQMNSLRAEDTAVYYCATAENFPGYDYWGQGTLVTVSS

SEQ ID NO: 1080 - protein, 118 aa, Homo sapiens
  VARIANT 61, 62: Xaa = Any Amino Acid
GVQLLESGGGLVQPGGSLRLSCAASGFIFWVYDMGWARQAPGKGLEWVSSIDWHGNVTYYXXSVKGRFTISRDNSKNTLYLQMNSLRAEDTAVYYCATAERDDTYDYWGQGTLVTVSS

SEQ ID NO: 1081 - protein, 118 aa, Homo sapiens
  VARIANT 61, 62: Xaa = Any Amino Acid
GVQLLESGGGLVQPGGSLRLSCAASGFIFWIYDMGWARQAPGKGLEWVSSIDWHGNVTYYXXSVKGRFTISRDNSKNTLYLQMNSLRAEDTAVYYCATAERDDTYDYWGQGTLVTVSS

SEQ ID NO: 1082 - protein, 118 aa, Homo sapiens
GVQLLESGGGLVQPGGSLRLSCAASGFIFAWYDMGWARQAPGKGLEWVSSIDWHGNVTYYADSVKGRFTISRDNSKNTLYLQMNSLRAEDTAVYYCATAEVDKGYDYWGQGTLVTVSS

SEQ ID NO: 1083 - protein, 118 aa, Homo sapiens
GVQLLESGGGLVQPGGSLRLSCAASGFIFAWYDMGWARQAPGKGLEWVSSIDWHGNVTYYADSVKGRFTISRDNSKNTLYLQMNSLRAEDTAVYYCATAEWLPSYDYWGQGTLVTVSS

SEQ ID NO: 1084 - protein, 118 aa, Homo sapiens
GVQLLESGGGLVQPGGSLRLSCAASGFIFAWYDMGWARQAPGKGLEWVSSIDWHGNVTYYADSVKGRFTISRDNSKNTLYLQMNSLRAEDTAVYYCATAESDPGYDYWGQGTLVTVSS

SEQ ID NO: 1085 - protein, 118 aa, Homo sapiens
GVRLLESGGGLVQPGGSLRLSCAASGFIFAWYDMGWARQAPGKGLEWVSSIDWHGNVTYYADSVKGRFTISRDNSKNTLYLQMNSLRAEDTAVYYCATAEKEVGYDYWGQGTLVTVLE

SEQ ID NO: 1086 - protein, 118 aa, Homo sapiens
GVQLLESGGGLVQPGGSLRLSCAASGFIFAWYDMGWARQAPGKGLEWVSSIDWHGNVTYYADSVKGRFTISRDNSKNTLYLQMNSLRAEDTAVYYCATAERDPGYDYWGQGTLVTVSS

SEQ ID NO: 1087 - protein, 118 aa, Homo sapiens
  VARIANT 76: Xaa = Any Amino Acid
GVQLLESGGGLVQPGGSLRLSCAASGFIFAWYDMGWARQAPGKGLEWVSSIDWHGNVTYYADSVKGRFTISRDNSXNTLYLQMNSLRAEDTAVYYCATAEKVPTYDYWGQGTLVTVSS

SEQ ID NO: 1088 - protein, 118 aa, Homo sapiens
GVQLLESGGGLVQPGGSLRLSCAASGFIFAWYDMGWARQAPGKGLEWVSSIDWHGNVTYYADSVKGRFTISRDNSKNTLYLQMNSLRAEDTAVYYCATAERVPGYDYWGQGTLVTVSS

SEQ ID NO: 1089 - protein, 118 aa, Homo sapiens
GVQLLESGGGLVQPGGSLRLSCAASGFIFAWYDMGWARQAPGKGLEWVSSIDWHGNVTYYADSVKGRFTISRDNSKNMLYLQMNSLRAEDTAVYYCATAEKDPGYDYWGQGTLVTVSS

SEQ ID NO: 1090 - protein, 118 aa, Homo sapiens
GVQLLESGGGLVQPGGSLRLSCAASGFIFAWYDMGWARQAPGKGLEWVSSIDWHGNVTYYADSVKGRFTISRDNSKNTLYLQMNSLRAEDTAVYYCATAEKEPGYDYWGQGTLVTVSS

SEQ ID NO: 1091 - protein, 118 aa, Homo sapiens
GVQLLESGGGLVQPGGSLRLSCAASGFIFAWYDMGWARQAPGKGLEWVSSIDWHGNVTYYADSVKGRFTISRDNSKNTLYLQMNSLRAEDTAVYYCATAEDEQGYDYWGQGTLVTVLE

SEQ ID NO: 1092 - protein, 118 aa, Homo sapiens; identical to SEQ ID NO: 1088

SEQ ID NO: 1093 - protein, 118 aa, Homo sapiens
GVQLLESGGGLVQPGGSLRLSCAASGFIFWIYDMAWARQAPGKGLEWVSSIDWHGNVTYYADSVKGRFTISRDNSKNTLYLQMNSLRAEDTAVYYCATAERDDTYDYWGQGTLVTVSS

SEQ ID NO: 1094 - protein, 118 aa, Homo sapiens
GVQLLESGGGLVQPGGSLRLSCAASGFIFMWYDMGWARQAPGKGLEWVSSIDWHGNVTYYADSVKGRFTISRDNSKNTLYLQMNSLRAEDTAVYYCATAERDDTYDYWGQGTLVTVSS

SEQ ID NO: 1095 - protein, 118 aa, Homo sapiens
GVQLLESGGGLVQPGGSLRLSCAASGFIFSWYDMKWARQAPGKGLEWVSSIDWHGNVTYYADSVKGRFTISRDNSKNTLYLQMNSLRAEDTAVYYCATAERDDTYDYWGQGTLVTVSS

SEQ ID NO: 1096 - protein, 118 aa, Homo sapiens
GVQLLESGGGLVQPGGSLRLSCAASGFIFAWYDMGWARQAPGKGLEWVSSIDWHGNVTYYADSVKGRFTISRDNSKNTLYLQMNSLRAEDTAVYYCATAEAEPGYDYWGQGTLVTVSS

SEQ ID NO: 1097 - protein, 118 aa, Homo sapiens
GVQLLESGGGLVQPGGSLRLSCAASGFIFAWYDMGWARQAPGKGLEWVSSIDWHGNVTYYADSVKGRFTISRDNSKNTLYLQMNSLRAEDTAVYYCATAEEEEGYDYWGQGTLVTVSS

SEQ ID NO: 1098 - protein, 118 aa, Homo sapiens
GVQLLESGGGLVQPGGSLRLSCAASGFIFAWYDMGWARQAPGKGLEWVSSIDWHGNVTYYADSVKGRFTISRDNSKNTLYLQMNSLRAEDTAVYYCATAEDDPGYDYWGQGTLVTVSS

SEQ ID NO: 1099 - protein, 118 aa, Homo sapiens
GVQLLESGGGLVQPGGSLRLSCAASGFIFAWYDMGWARQAPGKGLEWVSSIDWHGNVTYYADSVKGRFTISRDNSKNTLYLQMNSLRAEDTAVYYCATAEWEPGYDYWGQGTLVTILE

SEQ ID NO: 1100 - protein, 118 aa, Homo sapiens
GVQLLESGGGLVQPGGSLRLSCAASGFIFAWYDMGWARQAPGKGLEWVSSIDWHGNVTYYADSVKGRFTISRDNSKNTLYLQMNSLRAEDTAVYYCATAEEIPGYDYWGQGTLVTVLE

SEQ ID NO: 1101 - protein, 118 aa, Homo sapiens
GVQLLESGGGLVQPGGSLRLSCAASGFIFAWYDMGWARQAPGKGLEWVSSIDWHGNVTYYADSVKGRFTISRDNSKNTLYLQMNSLRAEDTAVYYCATAEDEPGYDYWGQGTLVTVSS

SEQ ID NO: 1102 - protein, 118 aa, Homo sapiens
GVQLLESGGGLVQPGGSLRLSCAASGFIFAWYDMGWARQAPGKGLEWVSSIDWHGNVTYYVDSVKGRFTISRDNSKNTLYLQMNSLRAEDTAVYYCATAETEPGYDYWGQGTLVTVSS

SEQ ID NO: 1103 - protein, 118 aa, Homo sapiens
GVQLLESGGGLVQPGGSLRLSCAASGFIFAWYDMGWARQAPGKGLEWVSSIDWHGNVTYYADSVKGRFTISRDNSKNTLYLQMNSLRAEDTAVYYCATAESIPGYDYWGQGTLVTVSS

SEQ ID NO: 1104 - protein, 118 aa, Homo sapiens
GVQLLESGGGLVQPGGSLRLSCAASGFIFAWYDMGWARQAPGKGLEWVSSIDWHGNVTYYADSVKGRFTISRDNSKNTLYLQMNSLRAEDTAVYYCATAEREPGYDYWGQGTLVTVSS

SEQ ID NO: 1105 - protein, 118 aa, Homo sapiens
GVQLLESGGGLVQPGGSLRLSCAASGFIFAWYDMGWARQAPGKGLEWVSSIDWHGNVTYYADSVKGRFTISRDNSKNTLYLQMNSLRAEDTAVYYCATAEKEEGYDYWGQGTLVTVSS

SEQ ID NO: 1106 - protein, 118 aa, Homo sapiens
GVQLLESGGGLVQPGGSLRLSCAASGFIFAWYDMGWARQAPGKGLEWVSSIDWHGNVTYYADSVKGRFTISRDNSKNTLYLQMNSLRAEDTAVYYCATAELDEGYDYWGQGTLVTVSS

SEQ ID NO: 1107 - protein, 118 aa, Homo sapiens
GVQLLESGGGLVQPGGSLRLSCAASGFIFAWYDMGWARQAPGKGLEWVSSIDWHGNVTYYADSVKGRFTISRDNSKNTLYLQMNSLRAEDTAVYYCATAEWWPGYDYWGQGTLVTVSS

SEQ ID NO: 1108 - protein, 118 aa, Homo sapiens
GVQLLESGGGLVQPGGSLRLSCAASGFIFAWYDMGWARQAPGKGLEWVSSIDWHGNVTYYADSVKGRFTISRDNSKNTLYLQMNSLRAEDTAVYYCATAESYKGYDYWGQGTLVTVSS

SEQ ID NO: 1109 - protein, 118 aa, Homo sapiens
GVQLLESGGGLVQPGGSLRLSCAASGFVFAWYDMGWARQAPGKGLEWVSSIDWHGNVTYYADSVKGRFTISRDNSKNTLYLQMNSLRAEDTAVYYCATAELDEGYDYWGQGTLVTVSS

SEQ ID NO: 1110 - protein, 118 aa, Homo sapiens
GVQLLESGGGLVQPGGSLRLSCAASGFIFAWYDMGWARQAPGKGLEWVSSIDWHGNVTYYADSVKGRFTISRDNSKNTLYLQMNSLRAEDTAVYYCATAEDTPGYDYWGQGTLVTVSS

SEQ ID NO: 1111 - protein, 118 aa, Homo sapiens
GVQLLESGGGLVQPGGSLRLSCAASGFIFAWYDMGWARQAPGKGLEWVSSIDWHGNVTYYADSVKGRFTISRDNSKNTLYLQMNSLRAEDTAVYYCATAEEEPGYDYWGQGTLVTVSS

SEQ ID NO: 1112 - protein, 118 aa, Homo sapiens
GVQLLESGGGLVQPGGSLRLSCAASGFIFAWYDMGWARQAPGKGLEWVSSIDWHGNVTYYADSVKGRFTISRDNSKNTLYLQMNSLRAEDTAVYYCATAEKTPGYDYWGQGTLVTVSS

SEQ ID NO: 1113 - protein, 118 aa, Homo sapiens
EVQLLESGGGLVQPGGSLRLSCAASGFIFAWYDMGWARQAPGKGLEWVSSIDWHGNVTYYADSVKGRFTISRDNSKNTLYLQMNSLRAEDTAVYYCATAEKEPGYDYWGQGTLVTVSS

SEQ ID NO: 1114 - protein, 118 aa, Homo sapiens
GVQLLESGGGLVQPGGSLRLSCAASGFIFAWYDMGWARQAPGKGLEWVSSIDWHGNVTYYADSVKGRFTISRDNSKNTLYLQMNSLRAEDTAVYYCATFERDDTYDYWGQGTLVTVSS

SEQ ID NO: 1115 - protein, 118 aa, Homo sapiens
GVQLLESGGGLVQPGGSLRLSCAASGFIFAWYDMGWARQAPGKGLEWVSSIDWHGNVTYYADSVKGRFTISRDNSKNTLYLQMNSLRAEDTAVYYCATTERDDTYDYWGQGTLVTVSS

SEQ ID NO: 1116 - protein, 118 aa, Homo sapiens
GVQLLESGGGLVQPGGSLRLSCAASGFIFAWYDMGWARQAPGKGLEWVSSIDWHGNVTYYADSVKGRFTISRDNSKNTLYLQMNSLRAEDTAVYYCATEERDDTYDYWGQGTLVTVSS

SEQ ID NO: 1117 - protein, 118 aa, Homo sapiens
GVQLLESGGGLVQPGGSLRLSCAASGFIFAWYDMGWARQAPGKGLEWVSSIDWHGNVTYYADSVKGRFTISRDNSKNTLYLQMNSLRAEDTAVYYCATSERDDTYDYWGQGTLVTVSS

SEQ ID NO: 1118 - protein, 118 aa, Homo sapiens
GVQLLESGGGLVQPGGSLRLSCAASGFIFAWYDMGWARQAPGKGLEWVSSIDWHGNVTYYADSVKGRFTISRDNSKNTLYLQMNSLRAEDTAVYYCATIERDDTYDYWGQGTLVTVSS

SEQ ID NO: 1119 - protein, 118 aa, Homo sapiens
GVQLLESGGGLVQPGGSLRLSCAASGFIFAWYDMGWARQAPGKGLEWVSSIDWHGNVTYYADSVKGRFTISRDNSKNTLYLQMNSLRAEDTAVYYCATATRDDTYDYWGQGTLVTVSS

SEQ ID NO: 1120 - protein, 118 aa, Homo sapiens
GVQLLESGGGLVQPGGSLRLSCAASGFIFAWYDMGWARQAPGKGLEWVSSIDWHGNVTYYADSVKGRFTISRDNSKNTLYLQMNSLRAEDTAVYYCATAERDETYDYWGQGTLVTVSS

SEQ ID NO: 1121 - protein, 118 aa, Homo sapiens
GVQLLESGGGLVQPGGSLRLSCAASGFIFAWYDVGWARQAPGKGLEWVSSIDWHGNVTYYADSVKGRFTISRDNSKNTLYLQMNSLRAEDTAVYYCATAERDDMYDYWGQGTLVTVSS

SEQ ID NO: 1122 - protein, 118 aa, Homo sapiens
GVQLLESGGGLVQPGGSLRLSCAASGFIFAWYDMGWARQAPGKGLEWVSSIDWHGNVTYYADSVKGRFTISRDNSKNTLYLQMNSLRAEDTAVYYCATAERDDTYLYWGQGTLVTVSS

SEQ ID NO: 1123 - protein, 118 aa, Homo sapiens
GVQLLESGGGLVQPGGSLRLSCAASGFIFAWYDMGWARQAPGKGLEWVSSIDWHGNVTYYADSVKGRFTISRDNSKNTLYLQMNSLRAEDTAVYYCATAEVEPGYDYWGQGTLVTVLE

SEQ ID NO: 1124 - protein, 119 aa, Homo sapiens
PGVQLLESGGGLVQPGGSLRLSCAASGFIFAWYDMGWARQAPGKGLEWVSSIDWHGNVTYYADSVKGRFTISRDNSKNTLYLQMNSLRAEDTAVYYCATAESEPGYDYWGQGTLVTVLE

SEQ ID NO: 1125 - protein, 118 aa, Homo sapiens
GVQLLESGGGLVQPGGSLRLSCAASGFIFAWYDMGWARQAPGKGLEWVSSIDWHGNVTYYADSVKGRFTISRDNSKNTLYLQMNSLRAEDTAVYYCATAEDLPGYDYWGQGTLVTVSS

SEQ ID NO: 1126 - protein, 118 aa, Homo sapiens
GVQLLESGGGLVQPGGSLRLSCAASGFIFAWYDMGWARQAPGKGLEWVSSIDWHGNVTYYADSVKGRFTISRDNSKNTLYLQMNSLRAEDTAVYYCATAESLPGYDYWGQGTLVTVSS

SEQ ID NO: 1127 - protein, 118 aa, Homo sapiens
GVQLLESGGGLVQPGGSLRLSCAASGFIFAWYDMGWARQAPGKGLEWVSSIDWHGNVTYYADSVKGRFTISRDNSKNTLYLQMNSLRAEDTAVYYCATAEYEPGYDYWGQGTLVTVSS

SEQ ID NO: 1128 - protein, 118 aa, Homo sapiens
GVQLLESGGGLVQPGGSLRLSCAASGFIFAWYDMGWARQAPGKGLEWVSSIDWHGNVTYYADSVKGRFTISRDNSKNTLYLQMNSLRAEDTAVYYCATAEQDPGYDYWGQGTLVTVSS

SEQ ID NO: 1129 - protein, 118 aa, Homo sapiens
GVQLLESGGGLVQPGGSLRLSCAASGFIFAWYDMGWARQAPGKGLEWVSSIDWHGNVTYYADSVKGRFTISRDNSKNTLYLQMNSLRAEDTAVYYCATAEMEPGYDYWGQGTLVTVLE

SEQ ID NO: 1130 - protein, 118 aa, Homo sapiens
GVQLLESGGGLVQPGGSLRLSCAASGFIFAWYDMGWARQAPGKGLEWVSSIDWHGNVTYYADSVKGRFTISRDNSKNTLYLQMNSLRAEDTAVYYCATAEEDPGYDYWGQGTLVTVSS

SEQ ID NO: 1131 - protein, 118 aa, Homo sapiens
GVQLLESGGGLVQPGGSLRLSCAASGFIFAWYDMGWARQAPGKGLEWVSSIDWHGNVTYYADSVKGRFTISRDNSKNTLYLQMNSLRAEDTAVYYCATAEFVPGYDYWGQGTLVTVSS

SEQ ID NO: 1132 - protein, 118 aa, Homo sapiens
GVQLLESGGGLVQPGGSLRLSCAASGFIFAWYDMGWARQAPGKGLEWVSGIDWHGNVTYYADSVKGRFTISRDNSKNTLYLQMNSLRAEDTAVYYCATAEDEPGYDYWGQGTLVTVSS

SEQ ID NO: 1133 - protein, 118 aa, Homo sapiens
GVQLLESGGGLVQPGGSLRLSCAASGFIFAWYDMGWARQAPGKGLEWVSYIDWHGNVTYYADSVKGRFTISRDNSKNTLYLQMNSLRAEDTAVYYCATAEDEPGYDYWGQGTLVTVSS

SEQ ID NO: 1134 - protein, 118 aa, Homo sapiens
GVQLLESGGGLVQPGGSLRLSCAASGFIFAWYDMGWARQAPGKGLEWVSKIDWHGNVTYYADSVKGRFTISRDNSKNTLYLQMNSLRAEDTAVYYCATAEDEPGYDYWGQGTLVTVSS

SEQ ID NO: 1135 - protein, 118 aa, Homo sapiens
GVQLLESGGGLVQPGGSLRLSCAASGFIFAWYDMGWARQAPGKGLEWVSVIDWHGNVTYYADSVKGRFTISRDNSKNTLYLQMNSLRAEDTAVYYCATAEDEPGYDYWGQGTLVTVSS

SEQ ID NO: 1136 - protein, 118 aa, Homo sapiens
GVQLLESGGGLVQPGGSLRLSCAASGFIFAWYDMGWARQAPGKGLEWVSIIDWHGNVTYYADSVKGRFTISRDNSKNTLYLQMNSLRAEDTAVYYCATAEDEPGYDYWGQGTLVTVSS

SEQ ID NO: 1137 - protein, 118 aa, Homo sapiens
GVQLLESGGGLVQPGGSLRLSCAASGFIFAWYDMGWARQAPGKGLEWVSNIDWHGNVTYYADSVKGRFTISRDNSKNTLYLQMNSLRAEDTAVYYCATAEDEPGYDYWGQGTLVTVSS

SEQ ID NO: 1138 - protein, 118 aa, Homo sapiens
GVQLLESGGGLVQPGGSLRLSCAASGFIFAWYDMGWARQAPGKGLEWVSWIDWHGNVTYYADSVKGRFTISRDNSKNTLYLQMNSLRAEDTAVYYCATAEDEPGYDYWGQGTLVTVSS

SEQ ID NO: 1139 - protein, 118 aa, Homo sapiens
GVQLLESGGGLVQPGGSLRLSCAASGFIFAWYDMGWARQAPGKGLEWVSRIDWHGNVTYYADSVKGRFTISRDNSKNTLYLQMNSLRAEDTAVYYCATAEDEPGYDYWGQGTLVTVSS

SEQ ID NO: 1140 - protein, 118 aa, Homo sapiens
GVQLLESGGGLVQPGGSLRLSCAASGFIFAWYDMGWARQAPGKGLEWVSSIPWHGNVTYYADSVKGRFTISRDNSKNTLYLQMNSLRAEDTAVYYCATAEDEPGYDYWGQGTLVTVSS

SEQ ID NO: 1141 - protein, 118 aa, Homo sapiens
GVQLLESGGGLVQPGGSLRLSCAASGFIFAWYDMGWARQAPGKGLEWVSSIWWHGNVTYYADSVKGRFTISRDNSKNTLYLQMNSLRAEDTAVYYCATAEDEPGYDYWGQGTLVTVSS

SEQ ID NO: 1142 - protein, 118 aa, Homo sapiens
GVQLLESGGGLVQPGGSLRLSCAASGFIFAWYDMGWARQAPGKGLEWVSSIVWHGNVTYYADSVKGRFTISRDNSKNTLYLQMNSLRAEDTAVYYCATAEDEPGYDYWGQGTLVTVSS

SEQ ID NO: 1143 - protein, 118 aa, Homo sapiens
GVQLLESGGGLVQPGGSLRLSCAASGFIFAWYDMGWARQAPGKGLEWVSSIIWHGNVTYYADSVKGRFTISRDNSKNTLYLQMNSLRAEDTAVYYCATAEDEPGYDYWGQGTLVTVSS

SEQ ID NO: 1144 - protein, 118 aa, Homo sapiens
  VARIANT 83, 95, 106, 117: Xaa = Any Amino Acid
GVQLLESGGGLVQPGGSLRLSCAASGFIFAWYDMGWARQAPGKGLEWVSSIQWHGNVTYYADSVKGRFTISRDNSKNTLYLQXNSLRAEDTPVYXCATAEDEPGYXYWGQGTLVTVXE

SEQ ID NO: 1145 - protein, 118 aa, Homo sapiens
GVQLLESGGGLVQPGGSLRLSCAASGFIFAWYDMGWARQAPGKGLEWVSSITWHGNVTYYADSVKGRFTISRDNSKNTLYLQMNSLRAEDTAVYYCATAEDEPGYDYWGQGTLVTVSS

SEQ ID NO: 1146 - protein, 118 aa, Homo sapiens
GVQLLESGGGLVQPGGSLRLSCAASGFIFAWYDMGWARQAPGKGLEWVSSIEWHGNVTYYADSVKGRFTISRDNSKNTLYLQMNSLRAEDTAVYYCATAEDEPGYDYWGQGTLVTVSS

SEQ ID NO: 1147 - protein, 118 aa, Homo sapiens
GVQLLESGGGLVQPGGSLRLSCAASGFIFAWYDMGWARQAPGKGLEWVSSIRWHGNVTYYADSVKGRFTISRDNSKNTLYLQMNSLRAEDTAVYYCATAEDEPGYDYWGQGTLVTVSS

SEQ ID NO: 1148 - protein, 118 aa, Homo sapiens
GVQLLESGGGLVQPGGSLRLSCAASGFIFAWYDMGWARQAPGKGLEWVSSIAWHGNVTYYADSVKGRFTISRDNSKNTLYLQMNSLRAEDTAVYYCATAEDEPGYDYWGQGTLVTVSS

SEQ ID NO: 1149 - protein, 118 aa, Homo sapiens
GVQLLESGGGLVQPGGSLRLSCAASGFIFAWYDMGWARQAPGKGLEWVSSIFWHGNVTYYADSVKGRFTISRDNSKNTLYLQMNSLRAEDTAVYYCATAEDEPGYDYWGQGTLVTVSS

SEQ ID NO: 1150 - protein, 118 aa, Homo sapiens
GVQLLESGGGLVQPGGSLRLSCAASGFIFAWYDMGWARQAPGKGLEWVSSIDWLGNVTYYADSVKGRFTISRDNSKNTLYLQMNSLRAEDTAVYYCATAEDEPGYDYWGQGTLVTVSS

SEQ ID NO: 1151 - protein, 118 aa, Homo sapiens
GVQLLESGGGLVQPGGSLRLSCAASGFIFAWYDMGWARQAPGKGLEWVSSIDWMGNVTYYADSVKGRFTISRDNSKNTLYLQMNSLRAEDTAVYYCATAEDEPGYDYWGQGTLVTVSS

SEQ ID NO: 1152 - protein, 118 aa, Homo sapiens
GVQLLESGGGLVQPGGSLRLSCAASGFIFAWYDMGWARQAPGKGLEWVSSIDWRGNVTYYADSVKGRFTISRDNSKNTLYLQMNSLRAEDTAVYYCATAEDEPGYDYWGQGTLVTVSS

SEQ ID NO: 1153 - protein, 118 aa, Homo sapiens
GVQLLESGGGLVQPGGSLRLSCAASGFIFAWYDMGWARQAPGKGLEWVSSIDWWGNVTYYADSVKGRFTISRDNSKNTLYLQMNSLRAEDTAVYYCATAEDEPGYDYWGQGTLVTVSS

SEQ ID NO: 1154 - protein, 118 aa, Homo sapiens
GVQLLESGGGLVQPGGSLRLSCAASGFIFAWYDMGWARQAPGQGLEWVSSIDWDGNVTYYADSVKGRFTISRDNSKNTLYLQMNSLRAEDTAVYYCATAEDEPGYDYWGQGTLVTVSS

SEQ ID NO: 1155 - protein, 118 aa, Homo sapiens
GVQLLESGGGLVQPGGSLRLSCAASGFIFAWYDMGWARQAPGKGLEWVSSIDWSGNVTYYADSVKGRFTISRDNSKNTLYLQMNSLRAEDTAVYYCATAEDEPGYDYWGQGTLVTVSS

SEQ ID NO: 1156 - protein, 118 aa, Homo sapiens
GVQLLESGGGLVQPGGSLRLSCAASGFIFAWYDMGWARQAPGKGLEWVSSIDWAGNVTYYADSVKGRFTISRDNSKNTLYLQMNSLRAEDTAVYYCATAEDEPGYDYWGQGTLVTVSS

SEQ ID NO: 1157 - protein, 118 aa, Homo sapiens
GVQLLESGGGLVQPGGSLRLSCAASGFIFAWYDMGWARQAPGKGLEWVSSIDWPGNVTYYADSVKGRFTISRDNSKNTLYLQMNSLRAEDTAVYYCATAEDEPGYDYWGQGTLVTVSS

SEQ ID NO: 1158 - protein, 118 aa, Homo sapiens
GVQLLESGGGLVQPGGSLRLSCAASGFIFAWYDMGWARQAPGKGLEWVSSIDWVGNVTYYADSVKGRFTISRDNSKNTLYLQMNSLRAEDTAVYYCATAEDEPGYDYWGQGTLVTVSS

SEQ ID NO: 1159 - protein, 118 aa, Homo sapiens
GVQLLESGGGLVQPGGSLRLSCAASGFIFAWYDMGWARQAPGKGLEWVSSIDWTGNVTYYADSVKGRFTISRDNSKNTLYLQMNSLRAEDTAVYYCATAEDEPGYDYWGQGTLVTVSS

SEQ ID NO: 1160 - protein, 118 aa, Homo sapiens
GVQLLESGGGLVQPGGSLRLSCAASGFIFAWYDMGWARQAPGKGLEWVSSIDWGGNVTYYADSVKGRFTISRDNSKNTLYLQMNSLRAEDTAVYYCATAEDEPGYDYWGQGTLVTVSS

SEQ ID NO: 1161 - protein, 118 aa, Homo sapiens
GVQLLESGGGLVQPGGSLRLSCAASGFIFAWYDMGWARQAPGKGLEWVSSIDWYGNVTYYADSVKGRFTISRDNSKNTLYLQMNSLRAEDTAVYYCATAEDEPGYDYWGQGTLVTVSS

SEQ ID NO: 1162 - protein, 118 aa, Homo sapiens
GVQLLESGGGLVQPGGSLRLSCAASGFIFAWYDMGWARQAPGKGLEWVSSIDWNGNVTYYADSVKGRFTISRDNSKNTLYLQMNSLRAEDTAVYYCATAEDEPGYDYWGQGTLVTVSS

SEQ ID NO: 1163 - protein, 118 aa, Homo sapiens
GVQLLESGGGLVQPGGSLRLSCAASGFIFAWYDMGWARQAPGKGLEWVSSIDWHGNGTYYADSVKGRFTISRDNSKNTLYLQMNSLRAEDTAVYYCATAEDEPGYDYWGQGTLVTVSS

SEQ ID NO: 1164 - protein, 118 aa, Homo sapiens
GVQLLESGGGLVQPGGSLRLSCAASGFIFAWYDMGWARQAPGKGLEWVSSIDWHGNLTYYADSVKGRFTISRDNSKNTLYLQMNSLRAEDTAVYYCATAEDEPGYDYWGQGTLVTVSS

SEQ ID NO: 1165 - protein, 118 aa, Homo sapiens
GVQLLESGGGLVQPGGSLRLSCAASGFIFAWYDMGWARQAPGKGLEWVSSIDWHGNMTYYADSVKGRFTISRDNSKNTLYLQMNSLRAEDTAVYYCATAEDEPGYDYWGQGTLVTVSS

SEQ ID NO: 1166 - protein, 118 aa, Homo sapiens
GVQLLESGGGLVQPGGSLRLSCAASGFIFAWYDMGWARQAPGKGLEWVSSIDWHGNRTYYADSVKGRFTISRDNSKNTLYLQMNSLRAEDTAVYYCATAEDEPGYDYWGQGTLVTVSS

SEQ ID NO: 1167 - protein, 118 aa, Homo sapiens
GVQLLESGGGLVQPGGSLRLSCAASGFIFAWYDMGWARQAPGKGLEWVSSIDWHGNYTYYADSVKGRFTISRDNSKNTLYLQMNSLRAEDTAVYYCATAEDEPGYDYWGQGTLVTVSS

SEQ ID NO: 1168 - protein, 118 aa, Homo sapiens
GVQLLESGGGLVQPGGSLRLSCAASGFIFAWYDMGWARQAPGKGLEWVSSIDWHGNFTYYADSVKGRFTISRDNSKNTLYLQMNSLCAEDTAVYYCATAEDEPGYDYWGQGTLVTVSS

SEQ ID NO: 1169 - protein, 118 aa, Homo sapiens
GVQLLESGGGLVQPGGSLRLSCAASGLIFAWYDMGWARQAPGKGLEWVSSIDWHGNKTYYADSVKGRFTISRDNSKNTLYLQMNSLRAEDTAVYYCATAEDEPGYDYWGQGTLVTVSS

SEQ ID NO: 1170 - protein, 118 aa, Homo sapiens
GVQLLESGGGLVQPGGSLRLSCAASGFIFAWYDMGWARQAPGKGLEWVSSIDWHGNSTYYADSVKGRFTISRDNSKNTLYLQMNSLRAEDTAVYYCATAEDEPGYDYWGQGTLVTVSS

SEQ ID NO: 1171 - protein, 118 aa, Homo sapiens
GVQLLESGGGLVQPGGSLRLSCAASGFIFAWYDMGWARQAPGKGLEWVSSIDWHGNATYYADSVKGRFTISRDNSKNTLYLQMNSLRAEDTAVYYCATAEDEPGYDYWGQGTLVTVSS

SEQ ID NO: 1172 - protein, 118 aa, Homo sapiens
GVQLLESGGGLVQPGGSLRLSCAASGFIFAWYDMGWARQAPGKGLEWVSSIDWHGNTTYYADSVKGRFTISRDNSKNTLYLQMNSLRAEDTAVYYCATAEDEPGYDYWGQGTLVTVSS

SEQ ID NO: 1173 - protein, 118 aa, Homo sapiens
GVQLLESGGGLVQPGGSLRLSCAASGFIFAWYDMGWARQAPGKGLEWVSSIDWHGNNTYYADSVKGRFTISRDNSKNTLYLQMNSLRAEDTAVYYCATAEDEPGYDYWGQGTLVTVSS

SEQ ID NO: 1174 - protein, 118 aa, Homo sapiens
GVQLLESGGGLVQPGGSLRLSCAASGFIFAWYDMGWARQAPGKGLEWVSSIDWHGNWTYYADSVKGRFTISRDNSKNTLYLQMNSLRAEDTAVYYCATAEDEPGYDYWGQGTLVTVSS

SEQ ID NO: 1175 - protein, 118 aa, Homo sapiens
GVQLLESGGGLVQPGGSLRLSCAASGFIFAWYDMGWARQAPGKGLEWVSSIDWHGSVTYYADSVKGRFTISRDNSKNTLYLQMNSLRAEDTAVYYCATAEDEPGYDYWGQGTLVTVSS

SEQ ID NO: 1176 - protein, 118 aa, Homo sapiens
GVQLLESGGGLVQPGGSLRLSCAASGFIFAWYDMGWARQAPGKGLEWVSSIDWHGQVTYYADSVKGRFTISRDNSKNTLYLQMNSLRAEDTAVYYCATAEDEPGYDYWGQGTLVTVSS

SEQ ID NO: 1177 - protein, 118 aa, Homo sapiens
GVQLLESGGGLVQPGGSLRLSCAASGFIFAWYDMGWVRQAPGKGLEWVSSIDWHGLVTYYADSVKGRFTISRDNSKNTLYLQMNSLRAEDTAVYYCATAEDEPGYDYWGQGTLVTVSS

SEQ ID NO: 1178 - protein, 118 aa, Homo sapiens
GVQLLESGGGLVQPGGSLRLSCAASGFIFAWYDMGWARQAPGKGLEWVSSIDWHGKVTYYADSVKGRFTISRDNSKNTLYLQMNSLRAEDTAVYYCATAEDEPGYDYWGQGTLVTVSS

SEQ ID NO: 1179 - protein, 118 aa, Homo sapiens
GVQLLESGGGLVQPGGSLRLSCAASGFIFAWYDMGWARQAPGKGLEWVSSIDWHGWVTYYADSVKGRFTISRDNSKNTLYLQMNSLRAEDTAVYYCATAEDEPGYDYWGQGTLVTVSS

SEQ ID NO: 1180 - protein, 118 aa, Homo sapiens
GVQLLESGGGLVQPGGSLRLSCAASGFIFAWYDMGWARQAPGKGLEWVSSIDWHGGVTYYADSVKGRFTISRDNSKNTLYLQMNSLRAEDTAVYYCATAEDEPGYDYWGQGTLVTVSS

SEQ ID NO: 1181 - protein, 118 aa, Homo sapiens
GVQLLESGGGLVQPGGSLRLSCAASGFIFAWYDMGWARQAPGKGLEWVSSIDWHGHVTYYADSVKGRFTISRDNSKNTLYLQMNSLRAEDTAVYYCATAEDEPGYDYWGQGTLVTVSS

SEQ ID NO: 1182 - protein, 118 aa, Homo sapiens
GVQLLESGGGLVQPGGSLRLSCAASGFIFAWYDMGWARQAPGKGLEWVSSIDWHGEVTYYADSVKGRFTISRDNSKNTLYLQMNSLRAEDTAVYYCATAEDEPGYDYWGQGTLVTVSS

SEQ ID NO: 1183 - protein, 118 aa, Homo sapiens
GVQLLESGGGLVQPGGSLRLSCAASGFIFAWYDMGWARQAPGKGLEWVSSIDWHGRVTYYADSVKGRFTISRDNSKNTLYLQMNSLRAEDTAVYYCATAEDEPGYDYWGQGTLVTVLE

SEQ ID NO: 1184 - protein, 118 aa, Homo sapiens
GVQLLESGGGLVQPGGSLRLSCAASGFIFAWYDMGWARQAPGKGLEWVSSIDWHGVVTYYADSVKGRFTISRDNSKNTLYLQMNSLRAEDTAVYYCATAEDEPGYDYWGQGTLVTVSS

SEQ ID NO: 1185 - protein, 118 aa, Homo sapiens
GVQLLESGGGLVQPGGSLRLSCAASGFIFAWYDMGWARQAPGKGLEWVSSIDWHGCVTYYADSVKGRFTISRDNSKNTLYLQMNSLRAEDTAVYYCATAEDEPGYDYWGQGTLVTVSS

SEQ ID NO: 1186 - protein, 118 aa, Homo sapiens
GVQLLESGGGLVQPGGSLRLSCAASGFIFAWYDMGWARQAPGKGLEWVSSIDWHGYVTYYADSVKGRFTISRDNSKNTLYLQMNSLRAEDTAVYYCATAEDEPGYDYWGQGTLVTVSS

SEQ ID NO: 1187 - protein, 118 aa, Homo sapiens
GVQLLESGGGLVQPGGSLRLSCAASGFIFAWYDMGWARQAPGKGLEWVSSIDWHGDVTYYADSVKGRFTISRDNSKNTLYLQMNSLRAEDTAVYYCATAEDEPGYDYWGQGTLVTVSS

SEQ ID NO: 1188 - protein, 118 aa, Homo sapiens
GVQLLESGGGLVQPGGSLRLSCAASGFIFAWYDMGWARQAPGKGLEWVSSIDWHGTVTYYADSVKGRFTISRDNSKNTLYLQMNSLRAEDTAVYYCATAEDEPGYDYWGQGTLVTVSS

SEQ ID NO: 1189 - protein, 118 aa, Homo sapiens
GVQLLESGGGLVQPGGSLRLSCAASGFIFAWYDMGWARQAPGKGLEWVSSIDWHGMVTYYADSVKGRFTISRDNSKNTLYLQMNSLRAEDTAVYYCATAEDEPGYDYWGQGTLVTVSS

SEQ ID NO: 1190 - protein, 118 aa, Homo sapiens
GVQLLESGGGLVQPGGSLRLSCAASGFIFNWYDMGWARQAPGKGLEWVSSIDWHGNVTYYADSVKGRFTISRDNSKNTLYLQMNSLRAEDTAVYYCATAEDEPGYDYWGQGTLVTVSS

SEQ ID NO: 1191 - protein, 118 aa, Homo sapiens
GVQLLESGGGLVQPGGSLRLSCAASGFIFHWYDMGWVRQAPGKGLEWVSSIDWHGNVTYYADSVKGRFTISRDNSKNTLYLQMNSLRAEDTAVYYCATAEDEPGYDYWGQGTLVTVSS

SEQ ID NO: 1192 - protein, 118 aa, Homo sapiens
GVQLLESGGGLVQPGGSLRLSCAASGFIFQWYDMGWARQAPGKGLEWVSSIDWHGDVTYYADSVKGRFTISRDNSKNTLYLQMNSLRAEDTAVYYCATAEDEPGYDYWGQGTLVTVSS

SEQ ID NO: 1193 - protein, 118 aa, Homo sapiens
GVQLLESGGGLVQPGGSLRLSCAASGFIFTWYDMGWARQAPGKGLEWVSSIDWHGNVTYYADSVKGRFTISRDNSKNTLYLQMNSLRAEDTAVYYCATAEDEPGYDYWGQGTLVTVSS

SEQ ID NO: 1194 - protein, 118 aa, Homo sapiens
GVQLLESGGGLVQPGGSLRLSCAASGFIFVWYDMGWARQAPGKGLEWVSSIDWHGNVTYYADSVKGRFTISRDNSKNTLYLQMNSLRAEDTAVYYCATAEDEPGYDYWGQGTLVTVSS

SEQ ID NO: 1195 - protein, 118 aa, Homo sapiens
GVQLLESGGGLVQPGGSLRLSCAASGFIFYWYDMGWARQAPGKGLEWVSSIDWHGNVTYYADSVKGRFTISRDNSKNTLYLQMNSLRAEDTAVYYCATAEDEPGYDYWGQGTLVTVSS

SEQ ID NO: 1196 - protein, 118 aa, Homo sapiens
  VARIANT 116, 117: Xaa = Any Amino Acid
GVQLLESGGGLVQPGGSLRLSCAASGFIFAVYDMGWARQAPGKGLEWVSSIDWHGNVTYYADSVKGRFTISRDNSKNTLYLQMNSLRAEDTAVYYCATAEDEPGYDYWGQGTLVTXXE

SEQ ID NO: 1197 - protein, 118 aa, Homo sapiens
GVQLLESGGGLVQPGGSLRLSCAASGFIFAWYDMMWARQAPGKGLEWVSSIDWHGNVTYYADSVKGRFTISRDNSKNTLYLQMNSLRAEDTAVYYCATAEDEPGYDYWGQGTLVTVSS

SEQ ID NO: 1198 - protein, 118 aa, Homo sapiens
GVQLLESGGGLVQPGGSLRLSCAASGFIFAWYDMYWVRQAPGKGLEWVSSIDWHGNVTYYADSVKGRFTISRDNSKNTLYLQMNSLRAEDTAVYYCATAEDEPGYDYWGQGTLVTVLE

SEQ ID NO: 1199 - protein, 118 aa, Homo sapiens
GVQLLESGGGLVQPGGSLRLSCAASGFIFAWYAMGWARQAPGKGLEWVSSIDWHGNVTYYADSVKGRFTISRDNSKNTLYLQMNSLRAEDTAVYYCATAEDEPGYDYLGQGTLVTVSS

SEQ ID NO: 1200 - protein, 118 aa, Homo sapiens
GVQLLESGGGLVQPGGSLRLSCAASGFIFAWYDMQWARQAPGKGLEWVSSIDWHGNVTYYADSVKGRFTISRDNSKNTLYLQMNSLRAEDTAVYYCATAEDEPGYDYWGQGTLVTVSS

SEQ ID NO: 1201 - protein, 118 aa, Homo sapiens
EVQLLESGGGLVQPGGSLRLSCAASGFIFAWYDMGWARQAPGKGLEWVSSIDWHGNVTYYADSVKGRFTISRDNSKNTLYLQMNSLRAEDTAVYYCATAEDEPGYDYWGQGTLVTVSS

SEQ ID NO: 1202 - protein, 118 aa, Homo sapiens
EVQLLESGGGLVQPGGSLRLSCAASGFIFAWYDMGWARQAPGKGLEWVSSIDWRGNVTYYADSVKGRFTISRDNSKNTLYLQMNSLRAEDTAVYYCATAEDEPGYDYWGQGTLVTVSS

SEQ ID NO: 1203 - protein, 118 aa, Homo sapiens
GVQLLESGGGLVQPGGSLRLSCAASGFIFAWYDMGWVRQAPGKGLEWVSSIDWHGNVTYYADSVKGRFTISRDNSKNTLYLQMNSLRAEDTAVYYCATAEDEPGYDYWGQGTLVTVSS

SEQ ID NO: 1204 - protein, 118 aa, Homo sapiens
GVQLLESGGGLVQPGGSLRLSCAASGFIFAWYDMGWVRQAPGKGLEWVSSIDWRGNVTYYADSVKGRFTISRDNSKNTLYLQMNSLRAEDTAVYYCATAEDEPGYDYWGQGTLVTVSS

SEQ ID NO: 1205 - protein, 118 aa, Homo sapiens
EVQLLESGGGLVQPGGSLRLSCAASGFIFAWYDMGWVRQAPGKGLEWVSSIDWHGNVTYYADSVKGRFTISRDNSKNTLYLQMNSLRAEDTAVYYCATAEDEPGYDYWGQGTLVTVSS

SEQ ID NO: 1206 - protein, 118 aa, Homo sapiens
EVQLLESGGGLVQPGGSLRLSCAASGFIFAWYDMGWVRQAPGKGLEWVSSIDWRGNVTYYADSVKGRFTISRDNSKNTLYLQMNSLRAEDTAVYYCATAEDEPGYDYWGQGTLVTVSS

SEQ ID NO: 1207 - protein, 118 aa, Homo sapiens
EVQLLESGGGLVQPGGSLRLSCAASGFIFAWYDMGWARQAPGKGLEWVSSIDWHGEVTYYADSVKGRFTISRDNSKNTLYLQMNSLRAEDTAVYYCATAEDEPGYDYWGQGTLVTVSS

SEQ ID NO: 1208 - protein, 118 aa, Homo sapiens
GVQLLESGGGLVQPGGSLRLSCAASGFIFAWYDMGWVRQAPGKGLEWVSSIDWHGEVTYYADSVKGRFTISRDNSKNTLYLQMNSLRAEDTAVYYCATAEDEPGYDYWGQGTLVTVSS

SEQ ID NO: 1209 - protein, 118 aa, Homo sapiens
EVQLLESGGGLVQPGGSLRLSCAASGFIFAWYDMGWVRQAPGKGLEWVSSIDWHGEVTYYADSVKGRFTISRDNSKNTLYLQMNSLRAEDTAVYYCATAEDEPGYDYWGQGTLVTVSS

SEQ ID NO: 1210 - protein, 118 aa, Homo sapiens
GVQLLESGGGLVQPGGSLRLSCAASGFIFQWYDMGWVRQAPGKGLEWVSSIDWHGDVTYYADSVKGRFTISRDNSKNTLYLQMNSLRAEDTAVYYCATAEDEPGYDYWGQGTLVTVSS

SEQ ID NO: 1211 - protein, 118 aa, Homo sapiens
EVQLLESGGGLVQPGGSLRLSCAASGFIFQWYDMGWVRQAPGKGLEWVSSIDWHGDVTYYADSVKGRFTISRDNSKNTLYLQMNSLRAEDTAVYYCATAEDEPGYDYWGQGTLVTVSS

SEQ ID NO: 1212 - protein, 118 aa, Homo sapiens
GVQLLESGGGLVQPGGSLRLSCAASGFIFAWYDMGWARQAPGKGLEWVSSIDWHGNVTYYADSVKGRFTISRDNSKNTLYLQMISLRAEDTAVYYCATAEDEPGYDYWGQGTLVTVSS

SEQ ID NO: 1213 - protein, 118 aa, Homo sapiens
GVQLLESGGGLVQPGGSLRLSCAASGFIFAWYDMGWARQAPGKGLEWVSSIDWHGNVTYYADSVKGRFIISRDNSKNTLYLQMNSLRAEDTAVYYCATAEDEPGYDYWGQGTLVTVSS

SEQ ID NO: 1214 - protein, 118 aa, Homo sapiens
GVQLLESGGGLVQPGGSLRLSCAASGFIFAWYDMGWARQAPGKGLEWVSSIDWHGNVIYYADSVKGRFTISRDNSKNTLYLQMNSLRAEDTAVYYCATAEDEPGYDYWGQGTLVTVSS

SEQ ID NO: 1215 - protein, 118 aa, Homo sapiens; identical to SEQ ID NO: 1171

SEQ ID NO: 1216 - protein, 118 aa, Homo sapiens
GVQLLESGGGLVQPGGSLRLSCAASGFIFAWYDMGWARQAPGKGLEWVSSIDWHGNVTYYADSEKGRFTISRDNSKNTLYLQMNSLRAEDTAVYYCATAEDEPGYDYWGQGTLVTVSS

SEQ ID NO: 1217 - protein, 118 aa, Homo sapiens
GVQLLESGGGLVQPGGSLRLSCAASGFIFAWYDMGWARQAPGKGLEWVTSIDWHGNVTYYADSVKGRFTISRDNSKNTLYLQMNSLRAEDTAVYYCATAEDEPGYDYWGQGTLVTVSS

SEQ ID NO: 1218 - protein, 118 aa, Homo sapiens
GVQLLESGGGLVQPGGSLRLSCAASGFIFAWYDMGWARQAPGKGLEWVSSIDWHGNVTYYADSVKGRFTISRDNSKNTLYLQMNSLRAEDTAVYYCATAEDEPGYDYWGHGTLVTVSS

SEQ ID NO: 1219 - protein, 118 aa, Homo sapiens
GVQLLESGGGLVHPGGSLRLSCAASGFIFAWYDMGWARQAPGKGLEWVSSIDWHGNVTYYADSVKGRFTISRDNSKNTLYLQMNSLRAEDTAVYYCATAEDEPGYDYWGQGTLVTVSS

SEQ ID NO: 1220 - protein, 118 aa, Homo sapiens
GVRLLESGGGLVQPGGSLRLSCAASGFIFAWYDMGWARQAPGKGLEWVSSIDWHGNVTYYADSVKGRFTISRDNSKNTLYLQMNSLRAEDTAVYYCATAEDEPGYDYWGQGTLVTVSS

SEQ ID NO: 1221 - protein, 118 aa, Homo sapiens
GVQLLESGGGLVQPGGSLRLSCAASGFIFAWYDMGWARQAPGKGLEWVSSIDWHGNVTYNADSVKGRFTISRDNSKNTLYLQMNSLRAEDTAVYYCATAEDEPGYDYWGQGTLVTVSS

SEQ ID NO: 1222 - protein, 118 aa, Homo sapiens
GVQLLESGGGLVQPGGSLRLSCAASGFIFAWYDMGWARQAPGKGLEWVSSIDWHDNVTYYADSVKGRFTISRDNSKNTLYLQMNSLRAEDTAVYYCATAEDEPGYDYWGQGTLVTVSS

SEQ ID NO: 1223 - protein, 118 aa, Homo sapiens
GVQLLESGGGLVQPGGSLRLSCAASGFIFAWYDMGWARQAPGKGLEWVSSIDWHGNVSYYADSVKGRFTISRDNSKNTLYLQMNSLRAEDTAVYYCATAEDEPGYDYWGQGTLVTVSS

SEQ ID NO: 1224 - protein, 118 aa, Homo sapiens
GVQLLESGGGLVQPGGSLRLSCAASGFIFAWYDMGWARQAPGKGLEWVSSIDWHGNVTYFADSVKGRFAISRDNSKNTLYLQMNSLRAEDTAVYYCATAEDEPGYDYWGQGTLVTVSS

SEQ ID NO: 1225 - protein, 118 aa, Homo sapiens
GVQLLESGGGLVQSGGSLRLSCAASGFIFAWYDMGWARQAPGKGLEWVSSIDWHGNVTYYADSVKGRFTISRDNSKNTLYLQMNSLRAEDTAVYYCATAEDEPGYDYWGQGTLVTVSS

SEQ ID NO: 1226 - protein, 118 aa, Homo sapiens; identical to SEQ ID NO: 1101

SEQ ID NO: 1227 - protein, 118 aa, Homo sapiens
GVQLSESGGGLVQPGGSLRLSCAASGFIFAWYDMGWARQAPGKGLEWVSSIDWHGNVTYYADSVKGRFTISRDNSKNTLYLQMNSLRAEDTAVYYCATAEDEPGYDYWGQGTLVTVSS

SEQ ID NO: 1228 - protein, 118 aa, Homo sapiens
GVQLLESGGGLVQPGGSLRLSCAASGFIFAWYDMGWARQAPGKGLEWVSSIDWHGNVTYYADSVKGRFTISRDNSKNTLYLQMNSLRAEDTAVYYCATAEDEPGYDYWGHGTVVTVSS

SEQ ID NO: 1229 - protein, 118 aa, Homo sapiens
GVQLLESGGGLVHPGGSLRLSCAASGFIFAWYDMGWARQAPGKGLEWVSSIDWHGNVTNYADSVKGRFTISRDNSKNTLYLQMNSLRAEDTAVYYCATAEDEPGYDYWGQGTLVTVSS

SEQ ID NO: 1230 - protein, 118 aa, Homo sapiens
GVQLLDSGGGLVQPGGSLRLSCAASGFIFAWYDMGWARQAPGKGLEWVSSIDWHGNVTYYADSVKGRFTISRDNSKNTLYLQMNSLRAEDTAVYYCATAEDEPGYDYWGQGTLVTVSS

SEQ ID NO: 1231 - protein, 118 aa, Homo sapiens
GVQLLESGGGLVQPGGSLRLSCAASGFIFAWYDMGWARQAPGKGLEWVSSIDWHGNDTYYADSVKGRFTISRDNSKNTLYLQMNSLRAEDTAVYYCATAEDEPGYDYWGQGTLVTVSS

SEQ ID NO: 1232 - protein, 118 aa, Homo sapiens
GVQLLESGGGLVQPGGSLRLSCAASGFIFAWYDMGWVRQAPGKGLEWVSSIDDHGNVTYYADSVKGRFTISRDNSKNTLYLQMNSLRAEDTAVYYCATAEDEPGYDYWGQGTLVTVSS

SEQ ID NO: 1233 - protein, 118 aa, Homo sapiens
GVQLLESGGGLVQPGGSLRLSCAASGFIFAWYDMGWVRQAPGKGLEWVSSIDWSGNVTYYADSVKGRFTISRDNSKNTLYLQMNSLRAEDTAVYYCATAEDEPGYDYWGQGTLVTVSS

SEQ ID NO: 1234 - protein, 118 aa, Homo sapiens
GVQLLESGGGLVQPGGSLRLSCAASGFIFAWYDMGWVRQAPGKGLEWVSSIDWHGTVTYYADSVKGRFTISRDNSKNTLYLQMNSLRAEDTAVYYCATAEDEPGYDYWGQGTLVTVSS

SEQ ID NO: 1235 - protein, 118 aa, Homo sapiens
GVQLLESGGGLVQPGGSLRLSCAASGFIFAWYDMGWVRQAPGKGLEWVSSIDWHGNQTYYADSVKGRFTISRDNSKNTLYLQMNSLRAEDTAVYYCATAEDEPGYDYWGQGTLVTVSS

SEQ ID NO: 1236 - protein, 118 aa, Homo sapiens
GVQLLESGGGLVQPGGSLRLSCAASGFIFAWYDMGWVRQAPGKGLEWVSKITDLGYATYYADSVKGRFTISRDNSKNTLYLQMNSLRAEDTAVYYCATAEDEPGYDYWGQGTLVTVSS

SEQ ID NO: 1237 - protein, 118 aa, Homo sapiens
GVQLLESGGGLVQPGGSLRLSCAASGFIFAWYDMGWARQAPGKGLEWVSSIDWHSNVTYYADSVKGRFTISRDNSKNTLYLQMNSLRAEDTAVYYCATAEDEPGYDYWGQGTLVTVSS

SEQ ID NO: 1238 - protein, 118 aa, Homo sapiens
GVQLLESGGGLVQPGGSLRLSCAASGFIFAWYDMGWARQAPGKGLEWVSHIDWHGNVTYYADSVKGRFTISRDNSKNTLYLQMNSLRAEDTAVYYCATAEDEPGYDYWGQGTLVTVSS

SEQ ID NO: 1239 - protein, 118 aa, Homo sapiens
GVQLLESGGGLVQPGGSLRLSCAASGFIFAWYDMGWARQAPGKGLEWVSTINDHGNVTYYADSVKGRFTISRDNSKNTLYLQMNSLRAEDTAVYYCATAEDEPGYDYWGQGTLVTVSS

SEQ ID NO: 1240 - protein, 118 aa, Homo sapiens
GVQLLESGGGLVQPGGSLRLSCAASGFIFAWYDMGWARQAPGKGLEWVSSIDWRGSVTYYADSVKGRFTISRDNSKNTLYLQMNSLRAEDTAVYYCATAEDEPGYDYWGQGTLVTVSS

SEQ ID NO: 1241 - protein, 118 aa, Homo sapiens
GVQLLESGGGLVQPGGSLRLSCAASGFIFAWYDMGWARQAPGKGLEWVSSIDWYGLVTYYADSVKGRFTISRDNSKNTLYLQMNSLRAEDTAVYYCATAEDEPGYDYWGQGTLVTVSS

SEQ ID NO: 1242 - protein, 118 aa, Homo sapiens
GVQLLESGGGLVQPGGSLRLSCAASGFIFAWYDMGWARQAPGKGLEWVSSIDWHGFVTYYADSVKGRFTISRDNSKNTLYLQMNSLRAEDTAVYYCATAEDEPGYDYWGQGTLVTVSS

SEQ ID NO: 1243 - protein, 119 aa, Homo sapiens
PGVQLLESGGGLVQPGGSLRLSCAASGFIFAWYDMGWARQAPGKGLEWVSSIDEPGRVTYYADSVKGRFTISRDNSKNTLYLQMNSLRAEDTAVYYCATAEDEPGYDYWGQGTLVTVSS

SEQ ID NO: 1244 - protein, 118 aa, Homo sapiens
GVQLLESGGGLVQPGGSLRLSCAASGFIFAWYDMGWVRQAPGKGLEWVSSIDWWGEVTYYADSVKGRFTISRDNSKNTLYLQMNSLRAEDTAVYYCATAEDEPGYDYWGQGTLVTVSS

SEQ ID NO: 1245 - protein, 118 aa, Homo sapiens
GVQLLESGGGLVQPGGSLRLSCAASGFIFAWYDMGWVRQAPGKGLEWVSSIDWRGIVTYYPDSVKGRFTISRDNSKNTLYLQMNSLRAEDTAVYYCATAEDEPGYDYWGQGTLVTVSS

SEQ ID NO: 1246 - protein, 118 aa, Homo sapiens
GVQLLESGGGLVQPGGSLRLSCAASGFIFAWYDMGWVRQAPGKGLEWVSSIDWRGLLTYYADSVKGRFTISRDNSKNTLYLQMNSLRAEDTAVYYCATAEDEPGYDYWGQGTLVIVSS

SEQ ID NO: 1247 - protein, 118 aa, Homo sapiens
GVQLLESGGGLVLPGGSLRLSCAASGFIFAWYDMGWARQAPGKGLEWVSSIDWRGGLTYYADSVKGRFTISRDNSKNTLYLQMNSLRAEDTAVYYCATAEDEPGYDYWGQGTLVTVSS

SEQ ID NO: 1248 - protein, 118 aa, Homo sapiens
GVQLLESGGGLVQPGGSLRLSCAASGFIFAWYDMGWARQAPGKGLEWVSSIDWRGKATYYADSVKGRFTISRDNSKNTLYLQMNSLRAEDTAVYYCATAEDEPGYDYWGQGTLVTVSS

SEQ ID NO: 1249 - protein, 118 aa, Homo sapiens
GVQLLESGGGLVQPGGSLRLSCAASGFIFAWYDMGWARQAPGKGLEWVSSIDWRGLSTYYADSVKGRFTISRDNSKNTLYLQMNSLRAEDTAVYYCATAEDEPGYDYWGQGTLVTVSS

SEQ ID NO: 1250 - protein, 118 aa, Homo sapiens
GVQLLESGGGLVQPGGSLRLSCAASGFIFAWYDMGWVRQAPGKGLEWVSSIDWHGKITYYADSVKGRFTISRDNSKNTLYLQMNSLRAEDTAVYYCATAEDEPGYDYWGQGTLVTVSS

SEQ ID NO: 1251 - protein, 118 aa, Homo sapiens
GVQLLESGGGLVQPGGSLRLSCAASGFIFAWYDMGWARQAPGKGLEWVSSIDWRGGTTYYADSVKGRFTISRDNSKNTLYLQMNSLRAEDTAVYYCATAEDEPGYDYWGQGTLVTVSN

SEQ ID NO: 1252 - protein, 118 aa, Homo sapiens
GVQLLESGGGLVQPGGSLRLSCAASGFIFAWYDMGWARQAPGKGLEWVSSIDWHGIETYYADSVKGRFTISRDNSKNTLYLQMNSLRAEDTAVYYCATAEDEPGYDYWGQGTLVTVSS

SEQ ID NO: 1253 - protein, 118 aa, Homo sapiens
GVQLLESGGGLVQPGGSLRLSCAASGFIFAWYDMGWARQAPGKGLEWVSSIDWHGSITYYADSVKGRFTISRDNSKNTLYLQMNSLRAEDTAVYYCATAEDEPGYDYWGQGTLVTVSS

SEQ ID NO: 1254 - protein, 118 aa, Homo sapiens
GVQLLESGGGLVQPGGSLRLSCAASGFIFAWYDMGWVRQAPGKGLEWVSSIDWYGTGTYYADSVKGRFTISRDNSKNTLYLQMNSLRAEDTAVYYCATAEDEPGYDYWGQGTLVTVSS

SEQ ID NO: 1255 - protein, 118 aa, Homo sapiens
GVQLLESGGGLVQPGGSLRLSCAASGFIFAWYDMGWARQAPGKGLEWVSSIDWRGTLTYYADSVKGRFTISRDNSKNTLYLQMNSLRAEDTAVYYCATAEDEPGYDYWGQGTLVTVSS

SEQ ID NO: 1256 - protein, 118 aa, Homo sapiens
GVQLLESGGGLVQPGGSLRLSCAASGFIFAWYDMGWARQAPGKGLEWVSSIDWRGLITYYADSVKGRFTISRDNSKNTLYLQMNSLRAEDTAVYYCATAEDEPGYDYWGQGTLVTVSS

SEQ ID NO: 1257 - protein, 118 aa, Homo sapiens
GVQLLESGGGLVQPGGSLRLSCAASGFIFAWYDMGWVRQAPGKGLEWVSSIDWLGKLTYYADSVKGRFTISRDNSKNTLYLQMNSLRAEDTAVYYCATAEDEPGYDYWGQGTLVTVSS

SEQ ID NO: 1258 - protein, 118 aa, Homo sapiens
GVQLLESGGGLVQPGGSLRLSCAASGFIFAWYDMGWVRQAPGKGLEWVSSIDWYGNVTYYADSVKGRFTISRDNSKNTLYLQMNSLRAEDTAVYYCATAEDEPGYDYWGQGTLVTVSS

SEQ ID NO: 1259 - protein, 118 aa, Homo sapiens
GVQLLESGGGLVQPGGSLRLSCAASGFIFAWYDMGWARQAPGKGLEWVSSINWLGNVTYYADSVKGRFTISRDNSKNTLYLQMNSLRAEDTAVYYCATAEDEPGYDYWGQGTLVTVSS

SEQ ID NO: 1260 - protein, 118 aa, Homo sapiens
GVQLLESGGGLVQPGGSLRLSCAASGFIFAWYDMGWARQAPGKGLEWVSSIGWHGNVTYYADSVKGRFTISRDNSKNTLYLQMNSLRAEDTAVYYCATAEDEPGYDYWGQGTLVTVSS

SEQ ID NO: 1261 - protein, 118 aa, Homo sapiens; identical to SEQ ID NO: 1158

SEQ ID NO: 1262 - protein, 118 aa, Homo sapiens
GVQLLESGGGLVQPGGSLRLSCAASGFIFAWYDMGWVRQAPGKGLEWVSSINDGGNVTYYADSVKGRFTISRDNSKNTLYLQMNSLRAEDTAVYYCATAEDEPGYDYWGQGTLVTVSS

SEQ ID NO: 1263 - protein, 118 aa, Homo sapiens
  VARIANT 106, 118: Xaa = Any Amino Acid
GVQLLESGGGLVQPGGSLRLSCAASGFIFAWYDMGWARQAPGKGLEWVSSIDWHGNVTYYADSVKGRFTISRDNSKNTLYLQMNSLRAEDTAVYYCATAEPFFSYXLLGSGKPWSPFX

SEQ ID NO: 1264 - protein, 119 aa, Homo sapiens
PGVQLLESGGGLVQPGGSLRLSCAASGFIFAWYDMGWARQAPGKGLEWVSSIDWRGDQTYYADSVKGRFTISRDNSKNTLYLQMNSLRAEDTAVYYCATAEDEPGYDYWGQGTLVTVSS

SEQ ID NO: 1265 - protein, 118 aa, Homo sapiens
GVQLLESGGGLVQPGGSLRLSCAASGFIFAWYDMGWARQAPGKGLEWVSSIDWQGNTTYYADSVKGRFTISRDNSKNTLYLQMNSLRAEDTAVYYCATAEDEPGYDYWGQGTLVTVSS

SEQ ID NO: 1266 - protein, 118 aa, Homo sapiens
GVQLLESGGGLVQPGGSLRLSCAASGFIFAWYDMGWVRQAPGKGLEWVSSIDWTGNVTYYADSVKGRFTISRDNSKNTLYLQMNSLRAEDTAVYYCATAEDEPGYDYWGQGTLVTVSS

SEQ ID NO: 1267 - protein, 118 aa, Homo sapiens
GVQLLESGGGLVQPGGSLRLSCAASGFIFAWYDMGWARQAPGKGLEWVSSISDRGNVTYYADSVKGRFTISRDNSKNTLYLQMNSLRAEDTAVYYCATAEDEPGYDYWGQGTLVTVSS

SEQ ID NO: 1268 - protein, 118 aa, Homo sapiens
GVQLLESGGGLVQPGGSLRLSCAASGFIFAWYDMGWARQAPGKGLEWVSSINDWGNVTYYADSVKGRFTISRDNSKNTLYLQMNSLRAEDTAVYYCATAEDEPGYDYWGQGTLVTVSS

SEQ ID NO: 1269 - protein, 118 aa, Homo sapiens
GVQLLESGGGLVQPGGSLRLSCAASGFIFAWYDMGWVRQAPGKGLEWVSSINDRGNVTYYADSVKGRFTISRDNSKNTLYLQMNSLRAEDTAVYYCATAEDEPGYDYWGQGTLVTVSS

SEQ ID NO: 1270 - protein, 118 aa, Homo sapiens
GVQLLESGGGLVQPGGSLRLSCAASGFIFAWYDMGWARQAPGKGLEWVSSIDWKGGKTYYADSVKGRFTISRDNSKNTLYLQMNSLRAEDTAVYYCATAEDEPGYDYWGQGTLVTVSS

SEQ ID NO: 1271 - protein, 118 aa, Homo sapiens
GVQLLESGGGLVQPGGSLRLSCAASGFIFAWYDMGWARQAPGKGLEWVSSINWHGNVTYYADSVKGRFTISRDNSKNTLYLQMNSLRAEDTAVYYCATAEDEPGYDYWGQGTLVTVSS

SEQ ID NO: 1272 - protein, 118 aa, Homo sapiens
GVQLLESGGGLVQPGGSLRLSCAASGFIFAWYDMGWARQAPGKGLEWVSVINWHGNVTYYADSVKGRFTISRDNSKNTLYLQMNSLRAEDTAVYYCATAEDEPGYDYWGQGTLVTVSS

SEQ ID NO: 1273 - protein, 118 aa, Homo sapiens
GVQLLESGGGLVQPGGSLRLSCAASGFIFAWYDMGWVRLAPGKGLEWVSMINWHGNVTYYADSVKGRFTISRDNSKNTLYLQMNSLRAEDTAVYYCATAEDEPGYDYWGQGTLVTVSS

SEQ ID NO: 1274 - protein, 118 aa, Homo sapiens
GVQLLESGGGLVQPGGSLRLSCAASGFIFAWYDMGWVRQAPGKGLEWVSKINWHGNVTYYADSVKGRFTVSRDNSKNTLYLQMNSLRAEDTAVYYCATAEDEPGYDYWGQGTLVTVSS

SEQ ID NO: 1275 - protein, 118 aa, Homo sapiens
GVQLLESGGGLVQPGGSLRLSCAASGFIFAWYDMGWVRQAPGKRLEWVSVINWHGNVTYYADSVKGRFTISRDNSKNTLYLQMNSLRAEDTAVYYCATAEDEPGYDYWGQGTLVTVSS

SEQ ID NO: 1276 - protein, 118 aa, Homo sapiens
GVQLLESGGGLVQPGGSLRLSCAASGFIFAWYDMGWVRQAPGKGLEWVSSISYHGNVTYYADSVKGRFTISRDNSKNTLYLQMNSLRAEDTAVYYCATAEDEPGYDYWGQGTLVTVSS

SEQ ID NO: 1277 - protein, 118 aa, Homo sapiens
GVQLLESGGGLVQPGGSLRLSCAASGFIFAWYDMGWARQAPGKGLEWVSHIESHGNVTYYADSVKGRFTISRDNSKNTLYLQMNSLRAEDTAVYYCATAEDEPGYDYWGQGTLVTVSS

SEQ ID NO: 1278 - protein, 118 aa, Homo sapiens
GVQLLESGGGLVQPGGSLRLSCAASGFIFAWYDMGWARQAPGKGLEWVSRITHHGNVTYYADSVKGRFTISRDNSKNTLYLQMNSLRAEDTAVYYCATAEDEPGYDYWGQGTLVTVSS

SEQ ID NO: 1279 - protein, 118 aa, Homo sapiens
GVQLLESGGGSVQPGGSLRLSCAASGFIFAWYDMGWVRQAPGKGLEWVSKIADHGNVTYYADSVKGRFTISRDNSKNTLYLQMNSLRAEDTAVYYCATAEDEPGYDYWGQGTLVTVSS

SEQ ID NO: 1280 - protein, 118 aa, Homo sapiens
GVQLLESGGGLVQPGGSLRLSCAASGFIFAWYDMGWVRQAPGKGLEWVSRIGAHGNVTYYADSVKGRFTISRDNSKNTLYLQMNSLRAEDTAVYYCATAEDEPGYDYWGQGTLVTVSS

SEQ ID NO: 1281 - protein, 118 aa, Homo sapiens
GVQLLESGGGLVQPGGSLRLSCAASGFIFAWYDMGWARQAPGKGLEWVSQISWHGNVTYYADSVKGRFTISRDNSKNTLYLQMNSLRAEDTAVYYCATAEDEPGYDYWGQGTLVTVSS

SEQ ID NO: 1282 - protein, 118 aa, Homo sapiens
GVQLLESGGGLVQPGGSLRLSCAASGFIFAWYDMGWVRQAPGKGLEWVSTINWHGNVTYYADSVKGRFTISRDNSKNTLYLQMNSLRAEDTAVYYCATAEDEPGYDYWGQGTLVTVSS

SEQ ID NO: 1283 - DNA, 326 bp, Homo sapiens
  misc_feature 325: n = A,T,C or G
gacatccagatgacccagtctccatcctccctgtctgcatctgtaggagaccgtgtcaccatcacttgccgggcaagtcagtggattgggccgtatttagagtggtaccagcagaaaccagggaaagcccctaagctcctgatctatacttcttcctttttgcaaagtggggtcccatcacgtttcagtggcagtggatctgggacagatttcactctcaccatcagcagtctgcaacctgaagattttgctacgtactactgtcaacagtcggtgtttattccttatacgttcggccaagggactaaggtggaaatcaaacggnc

SEQ ID NO: 1284 - DNA, 325 bp, Homo sapiens
gacatccagatgacccagtctccatcctccctgtctgcatctgtaggagaccgtgtcaccatcacttgccgggcaagtcagtcgattgcgtgggatttacattggtatcagcagaaaccagggaaagcccctaagctcctgatctatgatatgtccatgttgcaaagtggggtcccatcacgtttcagtggcagtggatctgggacagatttcactctcaccatcagcagtctgcaacctgaagattttgctacgtactactgtcaacagagttatgttcttccttttacgttcggccaagggaccaaggtggaaatcaaacggg

SEQ ID NO: 1285 - DNA, 324 bp, Homo sapiens
gacatccagatgacccagtctccatcctccctgtctgcatctgtaggagaccgtgtcaccatcacttgccgggcaagtcagtggattgggccgtatttaaattggtaccagcagaaaccagggaaagcccctaagctcctgatctatatggggtcctatttgcaaagtggggtcccatcacgtttcagtggcagtggatctgggacagatttcactctcaccatcagcagtctgcaacctgaagattttgctacgtactactgtcaacaggatctttatcctccttatacgttcggccaagggaccaaggtggaaatcaaacgg

SEQ ID NO: 1286 - DNA, 324 bp, Homo sapiens
gacatccagatgacccagtctccatcctccctgtctgcatctgtaggagaccgtgtcaccatcacttgccgggcaagtcagtggattgggccgtatttaaattggtaccagcagaaaccagggaaagcccctaagcccctgatctatatggggtcctatttgcaaagtggggtcccatcacgtttcagtggcagtggatctgggacagatttcactctcaccatcagcagtctgcaacctgaagattttgctacgtactactgtcaacaggatctttatcctccttatacgttcggccaagggaccaaggtggaaatcaaacgg

SEQ ID NO: 1287 - DNA, 324 bp, Homo sapiens
gacatccagatgacccagtctccatcctccctgtctgcatctgtaggagaccgtgtcaccatcacttgccgggcaagtcagtggattgggccgtatttaaattggtaccagcagaaaccagggaaagcccctaagctcctgatctatatggggtcctatttgccaagtggggtcccatcacgtttcagtggcagtggatctgggacagatttcactctcaccatcagcagtctgcaacctgaagattttgctacgtactactgtcaacaggatctttatcctccttatacgttcggccaagggaccaaggtggaaatcaaacgg

SEQ ID NO: 1288 - DNA, 324 bp, Homo sapiens
gacatccagatgacccagtctccatcctccctgtctgcatctgtaggagaccgtgtcaccatcacttgccgggcaagtcagtggattgggccgtatttaaattggtaccagcagaaaccagggaaagcccctaagctcctgatctatatggggtcctatttgcaaagtggggtcccatcacgtttcagtggcagtggatctgggacagatttcactctcaccatcagcagtctgcaacctgaagattttgctacgtactactgtcaacaggatctttatcctccttttacgttcggccaagggaccaaggtggaaatcaaacgg

SEQ ID NO: 1289 - DNA, 324 bp, Homo sapiens
gacatccagatgacccagtctccatcctccctgtctgcatctgtaggagaccgtgtcaccatcacttgccgggcaagtcagtggattgggccgtatttaaattggtaccagcagaaaccagggaaagcccctaagctcctgatctatgtggggtcctatttgcatagtggggtcccatcacgtttcagtggcagtggatctgggacagatttcactctcaccatcagcagtctgcaacctgaagattttgctacgtactactgtcaacaggatctttatcctccttatacgttcggccaagggaccaaggtggaaatcaaacgg

SEQ ID NO: 1290 - DNA, 324 bp, Homo sapiens
gacatccagatgacccagtctccatcctccctgtctgcatctgtaggagaccgtgtcaccatcacttgccgggcaagtcagtggattgggccgtatttaaattggtaccagcagaaaccagggaaagcccctaagctcctgatctatatggggtcctatttggtaagtggggtcccatcacgtttcagtggcagtggatctgggacagatttcactctcaccatcagcagtctgcaacctgaagattttgctacgtactactgtcaacaggatctttatcctccttatacgttcggccaagggaccaaggtggaaatcaaacgg

SEQ ID NO: 1291 - DNA, 324 bp, Homo sapiens
gacatccagatgacccagtctccatcctccctgtctgcatctgtaggagaccgtgtcaccatcacttgccgggcaagtcagtggattgggccgtatttaaattggtaccagcagaaaccagggaaagcccctaagctcctgatctatatggggtcctatttgtcaagtggggtcccatcacgtttcagtggcagtggatctgggacagatttcactctcaccatcagcagtctgcaacctgaagattttgctacgtactactgtcaacaggatctttatcctccttatacgttcggccaagggaccaaggtggaaatcaaacgg

SEQ ID NO: 1292 - DNA, 324 bp, Homo sapiens
  misc_feature 67: n = A,T,C or G
gacatccagatgacccagtctccatcctccctgtctgcatctgtaggagaccgtgtcaccatcactngccgggcaagtcagtggattgggccgtatttaaattggtaccagcagaaaccagggaaagcccctaagctcctgatctatatggggtcctatttgcaaagtggggtcccatcacgtttcagtggcagtggatctgggacagatttcactctcaccatcagcagtctgcaacctgaagattttgctacgtactactgtcaacaggatctttatcctccttttacgctcggccaagggaccaaggtggaaatcaaacgg

SEQ ID NO: 1293 - DNA, 324 bp, Homo sapiens
  misc_feature 67: n = A,T,C or G
gacatccagatgacccagtctccatcctccctgtctgcatctgtaggagaccgtgtcaccatcactngccgggcaagtcagtggattgggccgtatttaaattggtaccagcagaaaccagggaaagcccctaagctcctgatctatatggggtcctatttgcaaagtggggtcccatcacgtttcagtggcagtggatctgggacagatctcactctcaccatcagcagtctgcaacctgaagattttgctacgtactactgtcaacaggatctttatcctccttatacgttcggccaagggaccaaggtggaaatcaaacga

SEQ ID NO: 1294 - DNA, 324 bp, Homo sapiens
gacatccagatgacccagtctccatcctccctgtctgcatctgtaggagaccgtgtcaccatcacttgccgggcaagtcagtggattgggccgtatttaaattggtaccagcagaaaccagggaaagcccctaagctcctgatctatatggggtcctatttgcaaagtggggtcccatcacgtttcagtggcagtggatctgggacagatttcactctcaccatcagcagtctgcaacctaaagattttgctacgtactactgtcaacaggatctttatcctccttatacgttcggccaagggaccaaggtggaaatcaaacgg

SEQ ID NO: 1295 - DNA, 324 bp, Homo sapiens
gacatccagatgacccagtctccatcctccctgtctgcatctgtaggagaccgtgtcaccatcacttgccaggcaagtcagtggattgggccgtatctaaattggtaccagcagaaaccagggaaagcccctaagctcctgatgtatatggggtcctatttgcaaagtggggtcccatcacgtttcagtggcagtggatctgggacagatttcactttcaccatcagcagtctgcaacctgaagattttgctacgtactactgtcaacaggatctttatctcccttatacgtccggccaagggaccaaggtggaaatcaaacgg

SEQ ID NO: 1296 - DNA, 324 bp, Homo sapiens
gacatccagatgacccagtctccatcctccctgtctgcatctgtaggagaccgtgtcaccatcacttgccgggcaagtcagtggattgggccgtatttaaattggtaccagcagaaaccagggaaagcccctaagctcctgatctatatggggtcctatttgcaaagtggggtcccatcacgtttcagaggcagtggatctgggacagatttcactctcaccatcagcagtctgcaacctgaagattttgctacgtactactgtcaacaggatctttatcctccttatacgttcggccaagggaccaaggtggaaatcaaacgg

SEQ ID NO: 1297 - DNA, 324 bp, Homo sapiens
gacatccagatgacccagtctccatcctccctgtctgcatctgtaggagaccgtgtcaccatcacttgccgggcaagtcagtggattgggccgtatttaaattggtaccagcagaaaccagggaaagcccctaagctcctgatctatatggggtcctatttgcatagtggggtcccatcacgtttcagtggcagtggatctgggacagatttcactctcaccatcagcagtctgcaacctgaagactttgctacgtactactgtcaacaggatctttatcctccttatacgttcggccaagggaccaaggtggaaatcaaacgg

SEQ ID NO: 1298 - DNA, 324 bp, Homo sapiens
gacatccagatgacccagtctccatcctccctgtctgcatctgtaggagaccgtgtcaccatcatttgccgggcaagtgaatggattgggccgtatttaaattggtaccagcagaaaccagggaaagcccctaagctcctgatctatatggggtcctatttgcaaagtggggtcccatcacgtttcagtggcagtggatcagggacagatttcactctcaccatcagcagtcagcaacctgaagattttgctacgtactactgtcaacaggatctttatcctccttatacgttcggccaagggaccaaggtggaaatcaaacgg

SEQ ID NO: 1299 - DNA, 324 bp, Homo sapiens
  misc_feature 67: n = A,T,C or G
gacatccagatgacccagtctcaatcctccctgtctgcatatgtaggagaccgtgtcaccatcactngccgggcaagtcagtggattgggccgtatttaaattggtaccagcagaaacaagggaaagcccctaagctcctgatctatatggggtcctatttgcaaagtggggtcccatcacgtttcagtggcagtggatctgggacagatttcactctcaccatcagcagtctgcaacctgaagattttgctacgtactactgtcaacaggatctttatcctccttatacgttcggccaagggaccaaggtggaaatcaaacgg

SEQ ID NO: 1300 - DNA, 324 bp, Homo sapiens
gacatccagatgacccagtctccatcctccctgtctgcatatgtaggagaccgtgtcaccatcacttgccgggcaagtcagtggattgggccgtatttaaattggtaccagcagaaaccagggaaagcccctaagctcctgatctatatggggtcctatttgcaaagtggggtcccatcacgtttcagtggcagtggatctgggacagatttcactctcaccatcagcagtctgcaacctgaagattttgctacgtactactgtcaacaggatctttatcctccttatacgttcggccaagggaccaatgtggaaatcaaacgg

SEQ ID NO: 1301 - DNA, 324 bp, Homo sapiens
  misc_feature 67: n = A,T,C or G
gacatccagatgacccagtctccatcctccccctctgcatctgtaggagaccgtgtcaccatcactngccgggcaagtcagtggattgggccgtatttaaattggtaccagcagaaagcagggaaagcccctaagctcctgatctatatggggtcctatttgcaaagtggggtcccatcacgtttcagtggcagtggatctgggacagatttcactctcaccatcagcagtctgcaacctgaagattttgctacgtactactgtcaacaggatctttatcctccttatacgttcggccaagggaccaaggtggaaatcaaacgg

SEQ ID NO: 1302 - DNA, 324 bp, Homo sapiens
gacatccagatgacccagtctccatcctccctgtctgcatctgtaggagaccgtgtcaccatcacttgccgggcaagtcagtggattgggccgtatttaaattggtaccagcagaaaccagggaaagcccccaagctcctgatctatatggggtcctatttgcaaagtggggtcccatcacgtttcagtggcagtggatctgggacagatttcactctcaccatcagcagtctgcaacctgaagattttgctacgtactactgtcaacaggatctttatcctccttatacgttcggccaagggaccaagctggaaatcaaacgg

SEQ ID NO: 1303 - DNA, 324 bp, Homo sapiens
gacatccagatgacccagtctccatcctccctgtctgcatctgtaggagaccgtgtcaccatcacttgccgagcaagtcagtggagtgggccgtatttaaattggtaccagcagaaaccagggaaagcccctaagctcctgatctatatggggtcctatttgcaaagtggggtcccatcacgtttcagtggcagtggatctgggacagatttcactctcaccatcagcagtctgcaacctgaagattttgctacgtactactgtcaacaggatctttatcctccttatacgttcggccaagggaccaaggtggaaatcaaacgg

SEQ ID NO: 1304 - DNA, 324 bp, Homo sapiens
gacatccagatgacccagtctccatcctccctgtctgcatctgtaggagaccgtgtcaccatcacgtgccaggcaagtcagtggattgggccgtatttaaattggtaccagcagaaaccagggaaagcccctaagctcctgatctatatggggtcctatttgcaaagtggggtcccatcacgtttcagtggcagtggatctgggacagatttcaccctcaccatcagcagtctgcaacctgaagattttgctacgtactactgtcaacaggatctttatcctccttatacgttcggccaagggaccaaggtggaaatcaaacgg

SEQ ID NO: 1305 - DNA, 324 bp, Homo sapiens
gacatccagatgacccagtctccatcctccctgtctgcatctgtaggagaccgtgtcaccatcacttgccgggcaagtcagtggattgggccgtatttaaattggtaccagcagaaaccagggagagcccctaagctcctgatctatatggggtcctatttgcaaagtggggtcccatcacgtttcagtggcagtggatctgggacagatttcactctcaccatcagcagtctgcaacctgaagattttgctacgtactactgtcaacaggatctttatcctccttatacgttcggccaagggaccaaggtggaaatcaaacgg

SEQ ID NO: 1306 - DNA, 324 bp, Homo sapiens
gacatccagatgacccagtctccatcctccctgtctgcatctgtaggagaccgtgtcaccatcatttgccgggcaagtcagtggattgggccgtatttaaattggtaccagcagaaaccagggaaagcccctaagctcctgatctatatgggggcctatttgcaaagtggggtcccatcacgtttcagtggcagtggatctgggacagatttcactctcaccatcagcagtctgcaacctgaagattttgctacgtactactgtcaacaggatctttatcctccttatacgttcggccaagggaccaaggtggaaatcaaacgg

SEQ ID NO: 1307 - DNA, 324 bp, Homo sapiens
  misc_feature 67: n = A,T,C or G
gacatccagatgacccagtctccatcctccctgtctgcatctgtaggagaccgtgtcaccatcactngccgggcaagtcagtggattgggccgtatttaaattggtaccagcagaaaccagggaaagcccctatgctcctgatctatatggggtcctatttgcaaagtggggtcccatcacgtttcagtggcagtggatctgggacagatttcactctaaccatcagcagtctgcaacctgaagattttgctacgtactactgtcaacaggatctttatcctccttatacgttcggccaagggaccaaggtggaaatcaaacgg

SEQ ID NO: 1308 - DNA, 324 bp, Homo sapiens
  misc_feature 67: n = A,T,C or G
gacatccagatgacccagtctccatcctccctgtctgcatctgtaggagaccgtgtcatcatcactngccgggcaagtcagtggattgggccgtatttaaattggtaccagcagaaaccagggaaagcccctaagctcctgatctatatggggtcctatttgcaaagtgaggtcccatcacgtttcagtggcagtggatctgggacagatttcactctcaccatcagcagtctgcaacctgaagattttgctacgtactactgtcaacaggatctttatcctccttatacgttcggccaagggaccaaggtggaaatcaaacgg

SEQ ID NO: 1309 - DNA, 324 bp, Homo sapiens
gacatccagatgacccagtctccatcctccctgtctgcatctgtaggagaccgtgccaccatcacttgccgggcaagtcagtggattgggccgtatttaaattggtaccagcagaaaccatggaaagcccctaagctcctgatctatatggggtcctatttgcaaagtggggtcccatcacgtttcagtggcagtggatctgggacagatttcactctcaccatcagcagtctgcaacctgaagattttgctacgtactactgtcaacaggatctttatcctccttatacgttcggccaagggaccaaggtggaaatcaaacgg

SEQ ID NO: 1310 - DNA, 324 bp, Homo sapiens
  misc_feature 107: n = A,T,C or G
gacatccagatgacccagtctccatcctccctgtctgcatctgtaggagaccgtgtcaccatcacttgccgggcaagtcagtggattgggccgtatttaaattggtnccagcagaaaccagggaaagcccctaagcccctgatctatatggggaggtgggcgccgagcggggtcccatcacgcttcagtggcagtggatctgggacagatttcactctcaccatcagcagtctgcaacctgaagattttgctacgtactactgtcaacaggatctttatcctccttttacgttcggccaagggaccaaggtggaaatcaaacgg

SEQ ID NO: 1311 - DNA, 324 bp, Homo sapiens
  misc_feature 107: n = A,T,C or G
gacatccagatgacccagtctccatcctccctgtctgcatctgtaggagaccgtgtcaccatcacttgccgggcaagtcagtggattgggccgtatttaaattggtnccaacagaaaccagggaaagcccctaagcccctgatctatatggggtatcacgcgccgagtggggtcccatcacgcttcagtggcagtggatctgggacagatttcactctcaccatcagcagtctgcaacctgaagattttgctacgtactactgtcaacaggatctttatcctccttttacgttcggccaagggaccaaggtggaaatcaaacgg

SEQ ID NO: 1312 - DNA, 324 bp, Homo sapiens
  misc_feature 107: n = A,T,C or G
gacatccagatgacccagtctccatcctccctgtctgcatctgtaggagaccgtgtcaccatcacttgccgggcaagtcagtggattgggccgtatttaaattggtnccagcagaaaccagggaaagcccctaagcccctgatctatatggggtattgggcgagcagtggggtcccatcacgcttcagtggcagtggatctgggacagatttcactctcaccatcagcagtctgcaacctgaagattttgctacgtactactgtcaacaggatctttatcctccttttacgttcggccaagggaccaaggtggaaatcaaacgg

SEQ ID NO: 1313 - DNA, 324 bp, Homo sapiens
  misc_feature 107: n = A,T,C or G
gacatccagatgacccagtctccatcctccctgtctgcatctgtaggagaccgtgtcaccatcacttgccgggcaagtcagtggattgggccgtatttaaattggtnccagcagaaaccagggaaagcccctaagcctctgatctatatggggtattgggcgatcagtggggtcccatcacgcttcagtggcagtggatctgggacagatttcactctcaccatcagcagtctgcaacctgaagattttgctacgtactactgtcaacaggatctttatcctccttttacgttcggccaagggaccaaggtggaaatcaaacgg

SEQ ID NO: 1314 - DNA, 324 bp, Homo sapiens
gacatccagatgacccagtctccatcctccctgtctgcatctgtaggagaccgtgtcaccatcacttgccgggcaagtcagtggattgggccgtatttaaattggtttcaacagaaaccagggaaagcccctaagcccctgatctatatggggtattgggcgccgtccggggtcccatcacgcttcagtggcagtggatctgggacagatttcactctcaccatcagcagtctgcaacctgaagattttgctacgtactactgtcaacaggatctttatcctccttttacgttcggccaagggaccgaggtggaaatcaaacgg

SEQ ID NO: 1315 - DNA, 324 bp, Homo sapiens
gacatccagatgacccagtctccatcctccctgtctgcatctgtaggagaccgtgtcaccatcacttgccgggcaagtcagtggattgggccgtatttaaattggtaccaacagaaaccagggaaagcccctaagcccctgatctatatggggttctgggcgccgagtggggtcccatcacgcttcagtggcagtggatctgggacagatttcactctcaccatcagcagtctgcaacctgaagattttgctacgtactactgtcaacaggacctttatcccccttttacgttcggccaagggaccaaggtggaaatcaaacgg

SEQ ID NO: 1316 - DNA, 324 bp, Homo sapiens
gacatccagatgacccagtctccatcctccctgtctgcatctgtaggagaccgtgtcaccatcacttgccgggcaagtcagtggattgggccgtatttaaattggtaccagcagaaaccagggaaagcccctaagcccctgatctatatggggttctgcgcgccgagtggggtcccatcacgcttcagtggcagtggatctgggacagatttcactctcaccatcagcagtctgcaacctgaagattttgctacgtactactgtcaacaggatctttatcctccttttacgttcggccaagggaccaaggtggaaatcaaacgg

SEQ ID NO: 1317 - DNA, 324 bp, Homo sapiens
gacatccagatgacccagtctccatcctccctgtctgcatctgtaggagaccgtgtcaccatcacttgccgggcaggtcagtggattgggccgtatttaaattggtaccaacagaaaccagggaaagcccctaagcccctgatctatatggggtattgggcgcccagtggggtcccatcacgcttcagtggcagtggatctgggacagatttcactctcaccatcagcagtctgcaacctgaagattttgctacgtactactgtcaacaggatctttatcctccttttacgttcggccaagggaccaaggtggaaatcaaacgg

SEQ ID NO: 1318 - DNA, 324 bp, Homo sapiens
  misc_feature 114: n = A,T,C or G
gacatccagatgacccagtctccatcctccctgtctgcatctgtaggagaccgtgtcaccatcacttgccgggcaagtcagtggattgggccgtatttaaattggtaccagcanaaaccagggaaagcccctaagcccctgatctatatggggtattgggcgcccagtggggtcccatcacgcttcagtggcagtggatctgggacagatttcactctcaccatcagcagtctgcaacctgaagattttgctacgtactactgtcaacaggatctttatcctccttttacgttcggccaagggaccaaggtggaaatcggacgg

SEQ ID NO: 1319 - DNA, 324 bp, Homo sapiens
gacatccagatgacccagtctccatcctccctgtctgcatctgtaggagaccgtgtcaccatcacttgccgggcaagtcagtggattgggccgtatttaaattggtacaaacagaaaccagggaaagcccctaagcccctgatctatatggggtattgggcggggagtggggtcccatcacgcttcagtggcagtggatctgggacagatttcactctcaccatcagcagtctgcaacctgaagattttgctacgtactactgtcaacaggatctttatcctccttttacgttcggccaagggaccaaggtggaaatcagacgg

SEQ ID NO: 1320 - DNA, 324 bp, Homo sapiens
gacatccagatgacccagtctccatcctccctgtctgcatctgtaggagaccgtgtcaccatcacttgccgggcaagtcagtggattggggcctatttaaattggtaccaacagaaaccagggaaagcccctaagcccctgatctatatggggtattgggcgccgagtggggtcccatcacgcttcagtggcagtagatctgggacagatttcactctcaccatcagcagtctgcaacctgaagattttgctacgtactactgtcaacaggatctttatcctccttttacgttcggccaagggaccaaggtggaaatcaaacgg

SEQ ID NO: 1321 - DNA, 324 bp, Homo sapiens
gacatccagatgacccagtctccatcctccctgtctgcatctgtaggagaccgtgtcaccatcacttgccgggcaagtcagtggattgggccgtatttaaattggtaccaacagaaaccagggaaagcccctaagcccctgatctatatggggtattgggcgccgagtggggtcccatcacgcttcagtggcagtggatctgggacagatttcactctcaccatcagcagtctgcaacctgaagattttgctacgtactactgtcaacaggatgggtatcctccttttacgttcggccaaggtaccaaggtggaaatcaaacgg

SEQ ID NO: 1322 - DNA, 324 bp, Homo sapiens
gacatccagatgacccagtctccatcctccctgtctgcatctgtaggagaccgtgtcaccatcacttgccgggcaagtcagtggattgggccgtatttaaattggtaccaacagaaaccagggaaagcccctaagcccctgatctatatggggtattgggcgccgagtggggtcccatcacgcttcagtggcagtggatctgggacagatttcactctcaccatcagcagtctgcaacctgaagattttgctacgtactactgtcaacaggatgtctatcctccttttacgttcggccaagggaccaaggtggaaatcaaacgg

SEQ ID NO: 1323 - DNA, 324 bp, Homo sapiens
gacatccagatgacccagtctccatcctccctgtctgcatctgtaggagaccgtgtcaccatcacttgccgggcaagtcagtggattgggccgtatttaaattggtaccaacagaaaccagggaaagcccctaagcccctgatctatatggggtattgggcgccgagtggggtcccatcacgcttcagtggcagtggatctgggacagatttcactctcaccatcagcagtctgcaacctgaagattttgctacgtactactgtcaacaggatttctatcctccttttacgttcggccaagggaccaaggtggaaatcaaacgg

SEQ ID NO: 1324 - DNA, 324 bp, Homo sapiens
gacatccagatgacccagtctccatcctccctgtctgcatctgtaggagaccgtgtcaccatcacttgccgggcaagtcagtggattgggccgtatttaaattggtaccaacagaaaccagggaaagcccctaagcccctgatctatatggggtattgggcgccgagtggggtcccatcacgcttcagtggcagtggatctgggacagatttcactctcaccatcagcagtctgcaacctgaggattttgctacgtactactgtcaacaggatcttttgcctccttttacgttcggccaagggaccaaggtggaaatcaaacgg

SEQ ID NO: 1325 - DNA, 324 bp, Homo sapiens
gacatccagatgacccagtctccatcctccctgtctgcatctgtaggagaccgtgtcaccatcacttgccgggcaagtcagtggattgggccgtatttaaattggtaccaacagaaaccagggaaagcccctaagcccctgatctatatggggtattgggcgccgagtggggtcccatcacgcttcagtggcagtggatctgggacagatttcactctcaccatcagcagtctgcaacctgaagattctgctacgtactactgtcaacaggatatctatcctccttttacgttcggccaagggaccaaggtggaaatcaaacgg

SEQ ID NO: 1326 - DNA, 324 bp, Homo sapiens
gacatccagatgacccagtctccatcctccctgtctgcatctgtaggagaccgtgtcaccatcacttgccgggcaagtcagtggattgggccgtatttaaattggtaccaacagaaaccagggaaagcccctaagcccctgatctatatggggtattgggcgccgagtggggtcccatcacgcttcagtggcagtggatctgggacagatttcactctcaccatcagcagtctgcaacctgaagattttgctacgtactactgtcaacaggattggtatcctccttttacgttcggccaagggaccaaggtggaaatcaaacgg

SEQ ID NO: 1327 - DNA, 324 bp, Homo sapiens
gacatccagatgacccagtctccatcctccctgtctgcatctgtaggagaccgtgtcaccatcacttgccgggcaagtcagtggattgggccgtatttaaattggtaccagcagaaaccagggaaagcccctaagctcctgatctatatggggtcctatttgcaaagtggggtcccatcacgtttcagtggcagtggatctaggacagatttcactctcaccatcagcagtctgcaacctgaagattttgctacgtactactgtcaacaggatctttatcctccttatacgttcggccaagggacccaggtggaaatcaaacgg

SEQ ID NO: 1328 - DNA, 324 bp, Homo sapiens
gacatccagatgacccagtctccatcctccctgtctgcatctgtaggagaccgtgtcaccatcacttgccgggcaagtcagtggattgggccgtatttaaattggtaccagcagaaaccagggaaagcccctaagctcctgatctatatggggtcctatttgcaaagtggggtcccatcacgtttcagtggcagtggatctgggacagatttcactctcaccatcagcaatctgcaacctgaagattttgttacgtactactgtcaacaggatctttatcctccttatacgttcggccaagggaccaaggtggaaatcaaacgg

SEQ ID NO: 1329 - DNA, 324 bp, Homo sapiens; identical to SEQ ID NO: 426

SEQ ID NO: 1330 - DNA, 324 bp, Homo sapiens
gacatccagatgacccagtctccatccatcctgtctgcatctgtaggagaccgtgtcaccatcacttgcctggcaagtcagtggattgggccgtatttaaattggtaccagcagaaaccagggaaagcccctaagctcctgatctatatggggtcctatttgcaaagcggggtcccatcacgtttcagtggcagtggatctgggacagatttcactttcaccatcagcagtctgcaacctgaagattttgctacgtactactgtcaacaggatctttatcctccttatacgttcggccaagggaccaaggtggaaatcaaacgg

SEQ ID NO: 1331 - DNA, 324 bp, Homo sapiens
gacatccaggtgacccagtccccatccgccctgtctgcatctgtaggagaccgtgtcaccatcacttgccgggcaagtcagtggattgggccgtatctaaattggtaccagcagaaaccagggaaagcccctaagcccctgatctatatggggtcctatctgccaagtggggtcccatcacgcttcagtggcagtggatctgggacagatttcactctcaccatcagcagtctgcaacctgaagattttgctacgtactactgtcaacaggatctgtatcctccttatacgttcggccaggggaccaaggtggaaatcaaacgg

SEQ ID NO: 1332 - DNA, 324 bp, Homo sapiens
gacatccagatgacccagtctccatcctccctgtctgcatctgtaggagaccgtgtcaccatcacttgccgggcaagccagtggattgggccgtatttaaattggtaccagcagaaaccagggaaagcccctaagcccctgatctatatggggtcctatctgccaagtggggtcccatcacgtttcagtggcagtggatctgggacagatttcactctcaccatcagcagtctgcaacctgaagattttgctacgtactactgtcaacaggatctttatcctccttatacgttcggccaagggaccaaggtggaaatcaaacgg

SEQ ID NO: 1333 - DNA, 324 bp, Homo sapiens
gacatccagatgacccagtctccatcctccctgtctgcatctgtaggagaccgtgtcaccatcacttgccgggcaagtcagtggattgggccgtatttaaattggtaccagcagaaaccagggaaagcccctaagcccctgatctatatggggtcctatctgccaagtggggtcccatcacgtttcagtggcagtgggtctgggacagatttcactctcaccatcagcagtctgcaacctgaagattttgctacgtactactgccaacaggatctttatcctccttatacgttcggccaagggaccaaggtggaaatcaaacgg

SEQ ID NO: 1334 - DNA, 324 bp, Homo sapiens
gacatccagatgacccagtctccatcctccctgtctgcatctgtaggagaccgtgtcaccatcacttgccgggcaagtcagtggattgggccgtatttaaattggtaccagcagaaaccagggaaagcccctaagcccctgatttatatggggtcctatttgccaagtggggtcccatcacgtttcagtggcagtggatctgggacagatttcactctcaccatcaatagtctgcaacctgaagattttgctacgtactactgtcaacaggatctttatcctccttttacgttcggccaagggaccaaggtggaaatcaaacgg

SEQ ID NO: 1335 - DNA, 324 bp, Homo sapiens
gacatccagatgacccagtccccatcctccctgtctgcatctgtaggagaccgtgtcaccatcacttgccgggcaggtcagtggattgggccgtacttaaattggtaccagcagaaatcagggaaagcccctaagcccctgatttatatggggtcctatttgccaagtggggtcccatcacgtttcagtggcagtggatctgggacagatttcactctcaccatcaatagtctgcaacctgaagattttgctacgtactactgtcaacaggatctttatcctcctttcacgttcggccaagggaccaaggtgggaatcaaacgg

SEQ ID NO: 1336 - DNA, 324 bp, Homo sapiens
gacatccagatgacccagtctccatcctccctgtctgcatctgtaggagaccgtgtcaccatcacttgccaggcaagtcagtggattgggccgtatttaaattggtaccagcagaaaccaggggaagcccctaaacccctgatctatatggggtcctatttgccaagtggggtcccatcacgtttcagtggcagtggatctgggacagatttcactctcaccatcagcagtctgcaacctgaagattttgctacgtactactgtcaacaggatctttatcctccttttacgttcggccaagggaccaaggtggaaatcaaacgg

SEQ ID NO: 1337 - DNA, 324 bp, Homo sapiens
gacatccagatgacccagtctccatcctccctgtctgcatctgtaggagaccgtgtcaccatcacttgccgggcaagtcagtggattgggccgtatttaaattggtaccagcagaaaccaggggaagcccctaaacccctgatctatatggggtcctatttgccaagtggggtcccatcacgtttcagtggcagtggatctgggacagatttcactctcaccatcagcagtctgcaacctgaagactttgctacgtactactgtcaacaggatctttatcctccttttacgttcggccaagggaccaaggtggaaatcaaacgg

SEQ ID NO: 1338 - DNA, 324 bp, Homo sapiens
gacatccagatgacccagtctccatcctccctgtctgcatctgtaggagaccgtgtcaccatcacttgccgggcaagtcagtggattgggccgtatttaaattggtaccaacagaaaccagggaaagcccctaagcccctgatctatatggggtcctatctgccaagtggggtcccatcacgcttcagtggcagtggatctgggacagatttcactctcaccatcagcagtctgcaacctgaagattttgctacgtactactgtcaacaggatctttatcctccttttacgttcggccaagggaccaaggtggaaatcaaacgg

SEQ ID NO: 1339 - DNA, 324 bp, Homo sapiens
gacatccagatgacccagtctccatcctccctgtctgcatctgtaggagaccgtgtcaccatcacttgccgggcaagtcagtggattgggccgtatctaaattggtaccagcagaaaccagggaaagcccctaagcccctgatctatatggggtcctatctgccaagtggggtcccatcacgcttcagtggcagtggatctgggacagatttcactctcaccatcagcagtctgcaacctgaagattttgctacgtactactgtcaacaggatctttatcctccttatacgttcggccaagggaccaaggtggaaatcaaacgg

SEQ ID NO: 1340 - DNA, 324 bp, Homo sapiens
gacatccagatgacccagtccccatcctccctgtctgcatctgtaggagaccgtgtcaccatcacttgccgggcaggtcagtggattgggccgtacttaaattggtaccagcagaaatcagggaaagcccctaagcccctgatttatatggggtcctatttgccaagtggggtcccatcacgtttcagtggcagtggatctgggacagatttcactctcaccatcaatagtctgcaacctgaagattttgctacgtactactgtcaacaggatctttatcctccttttacgttcggccaagggaccaaggtggaaatcaaatgg

SEQ ID NO: 1341 - DNA, 324 bp, Homo sapiens; identical to SEQ ID NO: 1339

SEQ ID NO: 1342 - DNA, 324 bp, Homo sapiens
gacatccagatgacccagtctccatcctccctgtctgcatctgttggagaccgtgtcaccatcacttgccgggcaagtcagtggattgggccgtatttaaattggtaccagcagaaaccagggaaagcccctaagctcctgatctatatggggtcctatttgcaaagtggggtcccatcacgtttcagtggcagtggatctgggacagatttcactctcaccatcagcagtctgcaacctgaagattttgctacgtactactgccaacaggatctttatcctccttatgcgttcggccaagggaccaaggtggaaatcaaacgg

SEQ ID NO: 1343 - DNA, 324 bp, Homo sapiens
gacatccagatgacccagtctccatcctccctgtctgcatctgtaggggaccgtgtcaccatcacttgccgggcaagtcagtggattgggccgtatttaaattggtaccagcagagaccagggagagcccctaagctcctgatctatatggggtcctatttgcaaagtggggtcccatcacgtttcagtggcagtagatctgggaaagatttcactctcaccatcagcagtccgcaacctgaagattttgctacgtactactgtcaacaggatctttatcctccttatacgttcggccaagggaccaaggtggaaatcaaacgg

SEQ ID NO: 1344 - DNA, 324 bp, Homo sapiens
gacatccagatgacccagtctccatcctccctgtctgcatctgtaggagaccgtgtcaccatcacttgccgggcaagtcagtggattgggccgtatttaaattggtaccagcagaaaccagggaaagcccctaagctcctgatctatatggggtcctatttgcaaagtggggtcccatcacgtttcagtggcagtggatctaggacggatttcaccctcaccataagcagtctgcaacctgaagattatgctacgtactactgtcaacaggatctttatcctccttatacgttcggccaagggaccaaggtggaaatcaaacgg

SEQ ID NO: 1345 - DNA, 324 bp, Homo sapiens
gacatccagatgacccagtctccatcctccccgtctgcatctgtaggagaccgtgtcaccatcacttgccgggcaagtcagtggattgggccgtatttaaattggtaccagcagagaccagggaaagcccctaagctcctgatctatatggggtcctatttgcaaagtggggtcccatcacgtttcagtggcagtgggtctgggacagatttcactctcaccatcagcagtctgcaacctgaagattttgctacgtactactgtcaacaggatctttatcctcctttcacgttcggccaagggaccaaggtggaaatcaaaagg

SEQ ID NO: 1346 - DNA, 324 bp, Homo sapiens
gacatccagatgacccagtctccatcctccctgtctgcatctgtaggagaccgtgtcaccatcacttgccgggcaagtcagtggattgggccgtatttaaattggtaccagcagaaaccagggaaagcccctaagctcctgatctatatggggtcctatttgcaaagtggggtcccatcacgtttcagtggcagtggatctgggacagatttcactctcaccatcagcagtctgcaacctgaagattttgctacgtactactgtcaacaggatctttatccgcctttcacgttcggccaagggaccaaggtggaaatcaaacgg

SEQ ID NO: 1347 - DNA, 321 bp, Homo sapiens
gacatccagatgacccagtctccatcctccctgtctgcatctgtaggaaaccgtgtcaccatcacttgccgggcaagtcagtggattgggccgtatttaaattggtaccagcagaaaccaggggaagcccctaaacccctgatctatatggggtcctatttgccaagtggggtcccatcacgtttcagtggcagtggatctgggacagatttcgctctcaccatcagcagtctgcaacctgaagatgttgctacgtactactgtcaacaggatctttatcctccgacgttcggccaagggaccaaggtggaaatcaaacgg

SEQ ID NO: 1348 - DNA, 324 bp, Homo sapiens
gacatccagatgacccagtctccatcctccccgtctgcatctgtaggagaccgtgtcaccatcacttgccgggcaagtcagtggattgggccgtatttaaattggtaccagcagaaaccagggaaagcccctaagctcctgatctatatggggtcctatttgcaaagtggggtcccatcacgtttcagtggcagtggatctgggacagatttcactctcaccatcagcagtctgcaacctgaagattttgctacgtactactgtcaacaggatctttatcctccttatacgttcggccaagggaccaaggtggaaatcaaacgg

SEQ ID NO: 1349 - DNA, 324 bp, Homo sapiens
gacatccagatgacccagtctccatcctccctgtctgcatctgtaggagaccgtgtcaccatcacttgccgggcaagtcagtggattgggccgtatttaaattggtaccagcagaaaccagggaaagcccctaagctcctgatctatatggggtcctatttgcaaagtggggtcccatcacgtttcagtggcagtggatctgggacagatttcactctcaccatcagcagtctgcaacctgaagattttgctatgtactactgtcaacaggatctttatcctccttatacgttcggccaagggaccaaggtggaaatcaaacgg

SEQ ID NO: 1350 - DNA, 321 bp, Homo sapiens
gacatccagatgacccagtctccatcctccctgtctgcatctgtaggagaccgtgtcaccatcacttgccgggcaactcagtggattgggccgtatttaaattggtaccagcagaaaccagggaaagcccctaagctcctgatctatatggggtcctatttgcaaagtggggtcccatcacgtttcagtggcagtggatctgggacagatttcactctcaccatcagcagtctgcaacctgaagattttgctacgtactactgtcaacaggatctttatcctccgacgttcggccaagggaccaaggtggaaatcaaacgg

SEQ ID NO: 1351 - DNA, 324 bp, Homo sapiens; identical to SEQ ID NO: 1335

SEQ ID NO: 1352 - DNA, 324 bp, Homo sapiens
gacatccagatgacccagtccccatcctccctgtctgcatctgtaggagaccgtgtcaccatcacttgccgggcaagtcagtggattgggccgtatttaaattggtaccagcagaaaccagggaaagcccctaagcccctgatctatatggggtcctatctgccaagtggggtcccatcacgtttcagtggcagtggatctgggacagatttcactctcaccatcagcagtctgcaacctgaagattttgctacgtactactgccaacaggatctttaccctcctttcacgttcggccaagggaccaaggtggaaatcaaacgg

SEQ ID NO: 1353 - DNA, 324 bp, Homo sapiens
gacatccagatgacccagtctccatcctccctgtctgcatctgtgggagaccgtgtcaccatcacttgccgggcaagtcagtggattgggccgtatttaaattggtaccagcagaaaccagggaaagcccctaagctcctgatctatatggggtcctatctgcaaagtggggtcccatcacgtttcagtggcagtagatctgggacagatttcactctcaccatcagcagtctgcaacctgaagattttgctacgtactactgtcaacaggatctttatcctccttatacgttcggccaagggaccaaggtggaaatcaaacgg

SEQ ID NO: 1354 - DNA, 324 bp, Homo sapiens
gacatccagatgacccagtctccatcctccctgtctgcatctgtaggagaccgtgtcaccatcacttgccgggcaagtcagtggattgggccgtatttaaattggtaccagcagaaaccagggaaagcccctaagctcctgatctatatggggtcctatctgccaagtggggtcccatcacgtttcagtggcagtggatctgggacagatttcactctcaccatcagcagtctgcaacctgaagattttgctacgtactactgtcaacaggatctttatcctccttatacgttcggccaagggaccaaggtggaaatcaaacgg

SEQ ID NO: 1355 - DNA, 324 bp, Homo sapiens; identical to SEQ ID NO: 1337

SEQ ID NO: 1356 - DNA, 324 bp, Homo sapiens
gacatccagatgacccagtctccatcctccctgtctgcatctgtaggagaccgtgtcaccatcacttgccgggcaagtcagtggattgggccgtatctaaattggtaccagcagaaaccagggaaagcccctaagcccctgatctatatggggtcctatctgccaagtggggtcccatcacgcttcagtggcagtggatctgggacagatttcactctcaccatcagcagtctgcaacctgaagattttgctacgtactactgtcaacaggatctgtatcctccttatacgttcggccaggggaccaaggtggaaatcaaacgg

SEQ ID NO: 1357 - DNA, 324 bp, Homo sapiens; identical to SEQ ID NO: 1334

SEQ ID NO: 1358 - DNA, 324 bp, Homo sapiens
gacatccagatgacccaatctccatcctccctgtctgcatctgcaggagtccgtgtcgccatcacttgccgggcaagtcagtggattgggccgtatttaaattggtaccagcagaaaccagggaaagcccctaagctcctgatctatatggggtcctatttgcgaagtggggtcccatcacgtttcagtggcagtggatctgggacagatttcactctcaccatcagtagtctgcaacctgaagattttgctacgtactactgtcaacaggatctttatcctccttatacgttcggccaagggaccaaggtggaaatcaaacgg

SEQ ID NO: 1359 - DNA, 324 bp, Homo sapiens
gacatccagatgacccagtctccatcctccctgtctgcatctgtaggagaccgcgtcaccgtcacttgccgggcaagtcagtggattgggccgtatttaaattggtaccagcagaaaccggggaaagcccctaagctcctgatctatatggggtcctatttgcacagtggggtcccatcacgtttcagtggcagtggatctgggacagatttcactctcaccatcagcagtctgcaacctgaagattttgctacgtactactgtcaacaggatctttatcctccttatacgttcggccaagggaccaaggtggaaatcaaacgg

SEQ ID NO: 1360 - DNA, 324 bp, Homo sapiens
gacatccagatgacccagtctccatcctccctgtctgcatctgtaggagaccgtgtcaccatcacttgccgggcaagtcagtggattgggccgtatttaaattggtaccagcagaaaccagggaaagcccctaagctcctgatctatatggggtcctatttgcaaagtggggtcccatcacgtttcagtggcagtggatctgggacagatttcactctcaccatcagcagtctgcaacctgaagattttgccacgtactactgtcaacaggatctttatcctcctttcacgttcggccaagggaccaaggtggaaatcaaacgg

SEQ ID NO: 1361 - DNA, 324 bp, Homo sapiens
gacatccagatgacccagtctccatcctccctgtctgcatctgtaggagaccgtgtcaccatcacttgccgggcaagtcagtggattgggccgtatttaaattggtaccaacagaaaccagggaaagcccctaagcccctgatctatatggggtcctggcgcccgagtggggtcccatcacgcttcagtggcagtggatctgggacagatttcactctcaccatcagcagtctgcaacctgaagattttgctacgtactactgtcaacaggatctttatcctccttttacgttcggccaagggaccaaggtggaaatcaaacgg

SEQ ID NO: 1362 - DNA, 324 bp, Homo sapiens
gacatccagatgacccagtctccatcctccctgtctgcatctgtaggagaccgtgtcaccatcacttgccgggcaagtcagtggattgggccgtatttaaattggtaccaacagaaaccagggaaagcccctaagcccctgatctatatggggtattgggcgccgagtggggtcccatcacgcttcagtggcagtggatctgggacagatttcactctcaccatcagcagtctgcaacctgaagattttgctacgtactactgtcaacaggatctttatcctccttttacgttcggccaagggaccaaggtggaaatcaaacgg

SEQ ID NO: 1363 - DNA, 324 bp, Homo sapiens
gacatccagataacccagtctccatcctccctgtctgcatctgtaggagaccgtgtcaccatcacttgccgggcaagtcagtggattgggccgtatttaaattggtaccagcagaaaccagggaaagcccctaagcccctgatctatatggggtcctatctcgcgcacggggtcccatcacgtttcagtggcagtggatctgggacggatttcactctcaccatcagcagtctgcaacctgaagattttgctacgtactactgtcaacaggatctttatcctccttatacgttcggccaagggaccaaggtggaaatcaaacgg

SEQ ID NO: 1364 - DNA, 324 bp, Homo sapiens
gacatccagatgacccagtctccatcctccctgtctgcatctgtaggagaccgtgtcaccatcacttgccgggcaagtcagtggattgggccgtatttaaattggtaccagcagaaaccggggaaagcccctaagcccctgatctatatggggtcctatcacgggaccggggtcccatcacgtttcagtggcagtggatctgggacagatttcactctcaccatcagcagtctgcaacctgaagattatgctacgtactactgtcaacaggatctttatcctccttatacgttcggccaagggaccaaggtggaaatcaaacgg

SEQ ID NO: 1365 - DNA, 324 bp, Homo sapiens
gacatccagatgacccagtctccatcctccctgtctgcatctgtaggagaccgtgtcaccatcacttgccgggcaagtcagtggattgggccgtatttaaattggtaccagcagaaaccagggaaagcccctaagcccctgatttatatggggtcctataggccgttgggggtcccatcacgtttcagtggcagtggatctgggacagatttcactctcaccatcagcagtctgcaacctgaagattttgctacgtactactgtcaacaggatctttatcctccttatacgttcggccaagggaccaaggtggaaatcaaacgg

SEQ ID NO: 1366 - DNA, 324 bp, Homo sapiens
gacatccagatgacccagtctccatcctccctgtctgcatctgtaggagaccgtgtcaccatcacttgccgggcaagtcagtggattgggccgtatttaaattggtaccagcagaaaccagggaaagcccctaagcccctgatctatatggggtcctatcgccccgcgggggtcccatcacgtttcagtggcagtggatctgggacagatttcactctcaccatcagcagtctgcaacctgaagattttgctacgtactactgtcaacaggatctttatcctccttatacgttcggccaagggaccaaggtggaaatcaaacgg

SEQ ID NO: 1367 - DNA, 324 bp, Homo sapiens
gacatccagatgacccagtctccatcctccctgtctgcatctgtaggagaccgtgtcaccatcacttgccgggcaagtcagtggattgggccgtatttaaattggtaccagcagaaaccagggaaagcccctaagcccctgatctatatggggtcctatagggcgcagggggtcccatcacgtttcagtggcagtggatctgggacagatttcactctcaccatcagcagtctgcaacctgaagattttgctacgtactactgtcaacaggatctttatcctccttatacgttcggccaagggaccaaggtggaaatcaaacgg

SEQ ID NO: 1368 - DNA, 324 bp, Homo sapiens
gacatccagatgacccagtctccatcctccctgtctgcatctgtaggagaccgtgtcaccatcacttgccgggcaagtcagtggattgggccgtatttaaattggtaccagcagaaaccagggaaagcccctaagcccctgatctatatggggtcctatttcgcctcgggggtcccatcacgtttcagtggcagtggatctgggacaaatttcactctcaccatcagcagtctgcaacctgaagattttgctacgtactactgtcaacaggatctttatcctccttatacgttcggccaagggaccaaggtggaaatcaaacgg

SEQ ID NO: 1369 - DNA, 324 bp, Homo sapiens
gacatccagatgacccagtctccatcctccctgtctgcatctgtaggagaccgtgtcaccatcacttgccgggcaagtcagtggattgggccgtatttaaattggtaccagcagaaaccagggaaagcccctaagctcctgatctatatggggtcctattggtggtccggggtcccatcacgtttcagtggcagtggatctgggacagatttcactctcaccatcagcagtctgcaacctgaagattttgctacgtactactgtcaacaggatctttatcctccttatacgttcggccaagggaccaaggtggaaatcaaacgg

SEQ ID NO: 1370 - DNA, 324 bp, Homo sapiens
gacatccagatgacccagtctccatcctccctgtctgcatctgtaggagaccgtgtcaccatcacttgccgggcaagtcagtggattgggccgtatttaaattggtaccagcagaaaccagggaaagcccctaagctcctgatctatatggggtcctatttgcaaagtggggtcccatcacgtttcagtggcagtggatctgggacagatttcactctcaccatcagcagtctgcaacctgaagattttgctacgtactactgtcaacaggatctttatatgcctgcggagttcggccaagggaccaaggtggaaatcaaacgg

SEQ ID NO: 1371 - DNA, 324 bp, Homo sapiens
gacatccagatgacccagtctccatcctccctgtctgcatctgtaggagaccgtgtcaccatcacttgccgggcaagtcagtggattgggccgtatttaaattggtaccagcagaaaccagggaaagcccctaagctcctgatctatatggggtcctatttgcaaagtggggtcccatcacgtttcagtggcagtggatctgggacagatttcactctcaccatcagcagtctgcaacctgaagattttgctacgtactactgtcaacaggatctttatgagcctctcaacttcggccaagggaccaaggtggaaatcaaacgg

SEQ ID NO: 1372 - DNA, 324 bp, Homo sapiens
gacatccagatgacccagtctccatcctccctgtctgcatctgtaggagaccgtgtcaccatcacttgccgggcaagtcagtggattgggccgtatttaaattggtaccagcagaaaccagggaaagcccctaagctcctgacctatatggggtcctatttgcaaagtggggtcccatcacgtttcagtggcagtggatctgggacagatttcactctcaccatcagcagtctgcaacctgaagatttcgctacgtactactgtcaacaggatctttatatgccttcggagttcggccaagggaccaaggtggaaatcaaacgg

SEQ ID NO: 1373 - DNA, 324 bp, Homo sapiens
gacatccagatgacccagtctccatcctccctgtctgcatctgtaggagaccgtgtcaccatcacttgccgggcaagtcagtggattgggccgtatttaaattggtaccagcagaaaccagggaaagcccctaagctcctgatctatatggggtcctatttgcaaagtggggtcccatcacgtttcagtggcagtggatctgggacagatttcactctcaccatcagcagtctgcaacctgaagattttgctacgtactactgtcaacaggatctttatatgcctgtggagttcggccaagggaccaaggtggaaatcaaacgg

SEQ ID NO: 1374 - DNA, 324 bp, Homo sapiens
gacatccagatgacccagtctccatcctccctgtctgcatctgtaggagaccgtgtcaccatcacttgccgggcaagtcagtggattgggccgtatttaaattggtaccagcagaaaccagggaaagcccctaagctcctgatctatatggggtcctatttgcaaagtggggtcccatcacgtttcagtggcagtggatctgggacagatttcactctcaccatcagcagtctgcaacctgaagattttgctacgtactactgtcaacaggatctttatgggcctggggagttcggccaagggaccaaggtggaaatcaaacgg

SEQ ID NO: 1375 - DNA, 324 bp, Homo sapiens
gacatccagatgacccagtctccatcctccctgtctgcatccgtaggagaccgtgtcaccatcacttgccgggcaagtcagtggattgggccgtatttaaattggtaccagcagaaaccagggaaagcccctaagctcctgatctatatggggtcctatttgcaaagtggggtcccatcacgtttcagtggcagtggatctgggacagatttcactctcaccatcagcagtctgcaacctgaagattttgctacgtactactgtcaacaggatctttatttgcctttcaccttcggccaagggaccaaggtggaaatcaaacgg

SEQ ID NO: 1376 - DNA, 324 bp, Homo sapiens
gacatccagataacccagtctccatcctccctgtctgcatctgtaggagaccgtgtcaccatcacttgccgggcaagtcagtggattgggccgtatttaaattggtaccagcagaaaccagggaaagcccctaagctcctgatctatatggggtcctatttgcaaagtggggtcccatcacgtttcagtggcagtggatctgggacagatttcactctcaccatcagcagtctgcaacctgaagattttgctacgtactactgtcaacaggatctttatgcgccttggaagttcggccaagggaccaaggtggaaatcaaacgg

SEQ ID NO: 1377 - DNA, 324 bp, Homo sapiens
gacatccagatgacccagtctccatcctccctgtctgcatctgtaggagaccgtgtcaccatcacttgccgggcagaccagtggattgggccgtatttaaattggtaccagcagaaaccagggaaagcccctaagctcctgatctatatggggtcctatttgcaaagtggggtcccatcacgtttcagtggcagtggatctgggacagatttcactctcaccatcagcagtctgcaacctgaagattttgctacgtactactgtcaacaggatctttatcctccttatacgttcggccaagggaccaaggtggaaatcaaacgg

SEQ ID NO: 1378 - DNA, 324 bp, Homo sapiens
gacatccagatgacccagtctccatcctccctgtctgcatctgtaggagaccgtgtcaccatcacttgccgggcaacccagtggattgggccgtatttaaattggtaccagcagaaaccagggaaagcccctaagctcctgatctatatggggtcctatttgcaaagtggggtcccatcacgtttcagtggcagtggatctgggacagatttcactctcaccatcagcagtctgcaacctgaagattttgctacgtactactgccaacaggatctttatcctccttatacgttcggccaagggaccaaggtggaaatcaaacgg

SEQ ID NO: 1379 - DNA, 324 bp, Homo sapiens
gacatccagatgacccagtctccatcctccctgtctgcatctgtaggagaccgtgtcaccatcacttgccgggcaaaccagtggattgggccgtatttaaattggtaccagcagaaaccagggaaagcccctaagctcctgatctatatggggtcctatttgcaaagtggggtcccatcacgtttcagtggcagtggatctgggacagatttcactctcaccatcagcagtctgcaacctgaagattttgctacgtactactgtcaacaggatctttatcctccttatacgttcggccaagggaccaaggtggaaatcaaacgg

SEQ ID NO: 1380 - DNA, 324 bp, Homo sapiens
gacatccagatgacccagtctccatcctccctgtctgcatctgtaggagaccgtgtcaccatcacttgccgggcaagtcagtggattgggccgtatttaaattggtaccagcagaaaccagggaaagcccctaagctcctgatctatatggggtcctatttggccagtggggtcccatcacgtttcagtggcagtggatctgggacagatttcactctcaccatcagcagtctgcaacctgaagattttgctacgtactactgtcaacaggatctttatcctccttatacgttcggccaagggaccgaggtggaaatcaaacgg

SEQ ID NO: 1381 - DNA, 324 bp, Homo sapiens
gacatccagatgacccagtctccatcctccctgtctgcatctgtaggagaccgtgtcaccatcacttgccgggcaagtcagtggattgggccgtatttaaattggtaccagcagaaaccagggaaagcccctaagctcctgatctatatggggtcctatttgtggagtggggtcccatcacgtttcagtggcagtggatctgggacagatttcactctcaccatcagcagtctgcaacctgaagattttgctacgtactactgtcaacaggatctttatcctccttatacgttcggccaagggaccaaggtggaaatcaaacgg

SEQ ID NO: 1382 - DNA, 324 bp, Homo sapiens
gacatccagatgacccagtctccatcctccctgtctgcatctgtaggagaccgtgtcaccatcacttgccgggcaagtcagtggattgggccgtatttaaattggtaccagcagaaaccagggaaagcccctaagctcctgatctatatggggtcctatttggtgagtggggtcccatcacgtttcagtggcagtggatctgggacagatttcactctcaccatcagcagtctgcaacctgaagattttgctacgtactactgtcaacaggatctttatcctccttatacgttcggccaagggaccaaggtggaaatcaaacgg

SEQ ID NO: 1383 - DNA, 324 bp, Homo sapiens
gacatccagatgacccagtctccatcctccctgtctgcatctgtaggagaccgtgtcaccatcacttgccgggcaagtcagtggattgggccgtatttaaattggtaccagcagaaaccagggaaagcccctaagctcctgatctatatggggtcctatttgccgagtggggtcccatcacgtttcagtggcagtggatctgggacagatttcactctcaccatcagcagtctgcaacctgaagattttgctacgtactactgtcaacaggatctttatcctccttatacgttcggccaagggaccaaggtggaaatcaaacgg

SEQ ID NO: 1384 - DNA, 324 bp, Homo sapiens
gacatccagatgacccagtctccatcctccctgtctgcatctgtaggagaccgtgtcaccatcacttgccgggcaagtcagtggattgggccgtatttaaattggtaccagcagaaaccagggaaagcccctaagctcctgatctatatggggtcctatttgtccagtggggtcccatcacgtttcagtggcagtggatctgggacagatttcactctcaccatcagcagtctgcaacctgaagattttgctacgtactactgtcaacaggatctttatcctccttatacgttcggccaagggaccaaggtggaaatcaaacgg

SEQ ID NO: 1385 - DNA, 324 bp, Homo sapiens
gacatccagatgacccagtctccatcctccctgtctgcatctgtaggagaccgtgtcaccatcacttgccgggcaagtcagtggattgggccgtatttaaattggtaccaacagaaaccagggaaagcccctaagcccctgatctatatggggtattgggcgccgagtggggtcccatcacgcttcagtggcagtggatctgggacagatttcactctcaccatcagcagtctgcaacctgaagattttgctacgtactactgtcaacaggatctttatatgcctgcggagttcggccaagggaccaaggtggaaatcaaacgg

SEQ ID NO: 1386 - DNA, 324 bp, Homo sapiens
gacatccagatgacccagtctccatcctccctgtctgcatctgtaggagaccgtgtcaccatcacttgccgggcaagtcagtggattgggccgtatttaaattggtaccaacagaaaccagggaaagcccctaagcccctgatctatatggggtattgggcgccgagtggggtcccatcacgcttcagtggcagtggatctgggacagatttcactctcaccatcagcagtctgcaacctgaagattttgctacgtactactgtcaacaggatctttatgagcctctcaacttcggccaagggaccaaggtggaaatcaaacgg

SEQ ID NO: 1387 - DNA, 324 bp, Homo sapiens
gacatccagatgacccagtctccatcctccctgtctgcatctgtaggagaccgtgtcaccatcacttgccgggcaagtcagtggattgggccgtatttaaattggtaccaacagaaaccagggaaagcccctaagcccctgatctatatggggtattgggcgccgagtggggtcccatcacgcttcagtggcagtggatctgggacagatttcactctcaccatcagcagtctgcaacctgaagattttgctacgtactactgtcaacaggatctttatatgccttcggagttcggccaagggaccaaggtggaaatcaaacgg

SEQ ID NO: 1388 - DNA, 324 bp, Homo sapiens
gacatccagatgacccagtctccatcctccctgtctgcatctgtaggagaccgtgtcaccatcacttgccgggcaagtcagtggattgggccgtatttaaattggtaccaacagaaaccagggaaagcccctaagcccctgatctatatggggtattgggcgccgagtggggtcccatcacgcttcagtggcagtggatctgggacagatttcactctcaccatcagcagtctgcaacctgaagattttgctacgtactactgtcaacaggatctttatatgcctgtggagttcggccaagggaccaaggtggaaatcaaacgg

SEQ ID NO: 1389 - DNA, 324 bp, Homo sapiens
gacatccagatgacccagtctccatcctccctgtctgcatctgtaggagaccgtgtcaccatcacttgccgggcaagtcagtggattgggccgtatttaaattggtaccaacagaaaccagggaaagcccctaagcccctgatctatatggggtattgggcgccgagtggggtcccatcacgcttcagtggcagtggatctgggacagatttcactctcaccatcagcagtctgcaacctgaagattttgctacgtactactgtcaacaggatctttatgggcctggggagttcggccaagggaccaaggtggaaatcaaacgg

SEQ ID NO: 1390 - DNA, 324 bp, Homo sapiens
gacatccagatgacccagtctccatcctccctgtctgcatctgtaggagaccgtgtcaccatcacttgccgggcaagtcagtggattgggccgtatttaaattggtaccaacagaaaccagggaaagcccctaagcccctgatctatatggggtattgggcgccgagtggggtcccatcacgcttcagtggcagtggatctgggacagatttcactctcaccatcagcagtctgcaacctgaagattttgctacgtactactgtcaacaggatctttatttgcctttcatgttcggccaagggaccaaggtggaaatcaaacgg

SEQ ID NO: 1391 - DNA, 324 bp, Homo sapiens
gacatccagatgacccagtctccatcctccctgtctgcatctgtaggagaccgtgtcaccatcacttgccgggcaagtcagtggattgggccgtatttaaattggtaccaacagaaaccagggaaagcccctaagcccctgatctatatggggtattgggcgccgagtggggtcccatcacgcttcagtggcagtggatctgggacagatttcactctcaccatcagcagtctgcaacctgaagattttgctacgtactactgtcaacaggatctttatgcgccttggaagttcggccaagggaccaaggtggaaatcaaacgg

SEQ ID NO: 1392 - DNA, 324 bp, Homo sapiens
gacatccagataacccagtctccatcctccctgtctgcatctgtaggagaccgtgtcaccatcacttgccgggcaagtcagtggattgggccgtatttaaattggtaccagcagaaaccagggaaagcccctaagcccctgatctatatggggtcctatctcgcgcacggggtcccatcacgtttcagtggcagtggatctgggacggatttcactctcaccatcagcagtctgcaacctgaagattttgctacgtactactgtcaacaggatctttatatgcctgcggagttcggccaagggaccaaggtggaaatcaaacgg

SEQ ID NO: 1393 - DNA, 324 bp, Homo sapiens
gacatccagataacccagtctccatcctccctgtctgcatctgtaggagaccgtgtcaccatcacttgccgggcaagtcagtggattgggccgtatttaaattggtaccagcagaaaccagggaaagcccctaagcccctgatctatatggggtcctatctcgcgcacggggtcccatcacgtttcagtggcagtggatctgggacggatttcactctcaccatcagcagtctgcaacctgaagattttgctacgtactactgtcaacaggatctttatgagcctctcaacttcggccaagggaccaaggtggaaatcaaacgg

SEQ ID NO: 1394 - DNA, 324 bp, Homo sapiens
gacatccagataacccagtctccatcctccctgtctgcatctgtaggagaccgtgtcaccatcacttgccgggcaagtcagtggattgggccgtatttaaattggtaccagcagaaaccagggaaagcccctaagcccctgatctatatggggtcctatctcgcgcacggggtcccatcacgtttcagtggcagtggatctgggacggatttcactctcaccatcagcagtctgcaacctgaagattttgctacgtactactgtcaacaggatctttatatgccttcggagttcggccaagggaccaaggtggaaatcaaacgg

SEQ ID NO: 1395 - DNA, 324 bp, Homo sapiens
gacatccagataacccagtctccatcctccctgtctgcatctgtaggagaccgtgtcaccatcacttgccgggcaagtcagtggattgggccgtatttaaattggtaccagcagaaaccagggaaagcccctaagcccctgatctatatggggtcctatctcgcgcacggggtcccatcacgtttcagtggcagtggatctgggacggatttcactctcaccatcagcagtctgcaacctgaagattttgctacgtactactgtcaacaggatctttatatgcctgtggagttcggccaagggaccaaggtggaaatcaaacgg

SEQ ID NO: 1396 - DNA, 324 bp, Homo sapiens
gacatccagataacccagtctccatcctccctgtctgcatctgtaggagaccgtgtcaccatcacttgccgggcaagtcagtggattgggccgtatttaaattggtaccagcagaaaccagggaaagcccctaagcccctgatctatatggggtcctatctcgcgcacggggtcccatcacgtttcagtggcagtggatctgggacggatttcactctcaccatcagcagtctgcaacctgaagattttgctacgtactactgtcaacaggatctttatgggcctggggagttcggccaagggaccaaggtggaaatcaaacgg

SEQ ID NO: 1397 - DNA, 324 bp, Homo sapiens
gacatccagataacccagtctccatcctccctgtctgcatctgtaggagaccgtgtcaccatcacttgccgggcaagtcagtggattgggccgtatttaaattggtaccagcagaaaccagggaaagcccctaagcccctgatctatatggggtcctatctcgcgcacggggtcccatcacgtttcagtggcagtggatctgggacggatttcactctcaccatcagcagtctgcaacctgaagattttgctacgtactactgtcaacaggatctttatttgcctttcatgttcggccaagggaccaaggtggaaatcaaacgg

SEQ ID NO: 1398 - DNA, 324 bp, Homo sapiens
gacatccagataacccagtctccatcctccctgtctgcatctgtaggagaccgtgtcaccatcacttgccgggcaagtcagtggattgggccgtatttaaattggtaccagcagaaaccagggaaagcccctaagcccctgatctatatggggtcctatctcgcgcacggggtcccatcacgtttcagtggcagtggatctgggacggatttcactctcaccatcagcagtctgcaacctgaagattttgctacgtactactgtcaacaggatctttatgcgccttggaagttcggccaagggaccaaggtggaaatcaaacgg

SEQ ID NO: 1399 - DNA, 324 bp, Homo sapiens
gacatccagatgacccagtctccatcctccctgtctgcatctgtaggagaccgtgtcaccatcacttgccgggcaagtcagtggattgggccgtatttaaattggtaccagcagaaaccggggaaagcccctaagcccctgatctatatggggtcctatcacgggaccggggtcccatcacgtttcagtggcagtggatctgggacagatttcactctcaccatcagcagtctgcaacctgaagattatgctacgtactactgtcaacaggatctttatatgcctgcggagttcggccaagggaccaaggtggaaatcaaacgg

SEQ ID NO: 1400 - DNA, 324 bp, Homo sapiens
gacatccagatgacccagtctccatcctccctgtctgcatctgtaggagaccgtgtcaccatcacttgccgggcaagtcagtggattgggccgtatttaaattggtaccagcagaaaccggggaaagcccctaagcccctgatctatatggggtcctatcacgggaccggggtcccatcacgtttcagtggcagtggatctgggacagatttcactctcaccatcagcagtctgcaacctgaagattatgctacgtactactgtcaacaggatctttatgagcctctcaacttcggccaagggaccaaggtggaaatcaaacgg

SEQ ID NO: 1401 - DNA, 324 bp, Homo sapiens
gacatccagatgacccagtctccatcctccctgtctgcatctgtaggagaccgtgtcaccatcacttgccgggcaagtcagtggattgggccgtatttaaattggtaccagcagaaaccggggaaagcccctaagcccctgatctatatggggtcctatcacgggaccggggtcccatcacgtttcagtggcagtggatctgggacagatttcactctcaccatcagcagtctgcaacctgaagattatgctacgtactactgtcaacaggatctttatatgccttcggagttcggccaagggaccaaggtggaaatcaaacgg

SEQ ID NO: 1402 - DNA, 324 bp, Homo sapiens
gacatccagatgacccagtctccatcctccctgtctgcatctgtaggagaccgtgtcaccatcacttgccgggcaagtcagtggattgggccgtatttaaattggtaccagcagaaaccggggaaagcccctaagcccctgatctatatggggtcctatcacgggaccggggtcccatcacgtttcagtggcagtggatctgggacagatttcactctcaccatcagcagtctgcaacctgaagattatgctacgtactactgtcaacaggatctttatatgcctgtggagttcggccaagggaccaaggtggaaatcaaacgg

SEQ ID NO: 1403 - DNA, 324 bp, Homo sapiens
gacatccagatgacccagtctccatcctccctgtctgcatctgtaggagaccgtgtcaccatcacttgccgggcaagtcagtggattgggccgtatttaaattggtaccagcagaaaccggggaaagcccctaagcccctgatctatatggggtcctatcacgggaccggggtcccatcacgtttcagtggcagtggatctgggacagatttcactctcaccatcagcagtctgcaacctgaagattatgctacgtactactgtcaacaggatctttatgggcctggggagttcggccaagggaccaaggtggaaatcaaacgg

SEQ ID NO: 1404 - DNA, 324 bp, Homo sapiens
gacatccagatgacccagtctccatcctccctgtctgcatctgtaggagaccgtgtcaccatcacttgccgggcaagtcagtggattgggccgtatttaaattggtaccagcagaaaccggggaaagcccctaagcccctgatctatatggggtcctatcacgggaccggggtcccatcacgtttcagtggcagtggatctgggacagatttcactctcaccatcagcagtctgcaacctgaagattatgctacgtactactgtcaacaggatctttatttgcctttcatgttcggccaagggaccaaggtggaaatcaaacgg

SEQ ID NO: 1405 - DNA, 324 bp, Homo sapiens
gacatccagatgacccagtctccatcctccctgtctgcatctgtaggagaccgtgtcaccatcacttgccgggcaagtcagtggattgggccgtatttaaattggtaccagcagaaaccggggaaagcccctaagcccctgatctatatggggtcctatcacgggaccggggtcccatcacgtttcagtggcagtggatctgggacagatttcactctcaccatcagcagtctgcaacctgaagattatgctacgtactactgtcaacaggatctttatgcgccttggaagttcggccaagggaccaaggtggaaatcaaacgg

SEQ ID NO: 1406 - DNA, 324 bp, Homo sapiens
gacatccagatgacccagtctccatcctccctgtctgcatctgtaggagaccgtgtcaccatcacttgccgggcaagtcagtggattgggccgtatttaaattggtaccagcagaaaccagggaaagcccctaagcccctgatttatatggggtcctataggccgttgggggtcccatcacgtttcagtggcagtggatctgggacagatttcactctcaccatcagcagtctgcaacctgaagattttgctacgtactactgtcaacaggatctttatatgcctgcggagttcggccaagggaccaaggtggaaatcaaacgg

SEQ ID NO: 1407 - DNA, 324 bp, Homo sapiens
gacatccagatgacccagtctccatcctccctgtctgcatctgtaggagaccgtgtcaccatcacttgccgggcaagtcagtggattgggccgtatttaaattggtaccagcagaaaccagggaaagcccctaagcccctgatttatatggggtcctataggccgttgggggtcccatcacgtttcagtggcagtggatctgggacagatttcactctcaccatcagcagtctgcaacctgaagattttgctacgtactactgtcaacaggatctttatgagcctctcaacttcggccaagggaccaaggtggaaatcaaacgg

SEQ ID NO: 1408 - DNA, 324 bp, Homo sapiens
gacatccagatgacccagtctccatcctccctgtctgcatctgtaggagaccgtgtcaccatcacttgccgggcaagtcagtggattgggccgtatttaaattggtaccagcagaaaccagggaaagcccctaagcccctgatttatatggggtcctataggccgttgggggtcccatcacgtttcagtggcagtggatctgggacagatttcactctcaccatcagcagtctgcaacctgaagattttgctacgtactactgtcaacaggatctttatatgccttcggagttcggccaagggaccaaggtggaaatcaaacgg

SEQ ID NO: 1409 - DNA, 324 bp, Homo sapiens
gacatccagatgacccagtctccatcctccctgtctgcatctgtaggagaccgtgtcaccatcacttgccgggcaagtcagtggattgggccgtatttaaattggtaccagcagaaaccagggaaagcccctaagcccctgatttatatggggtcctataggccgttgggggtcccatcacgtttcagtggcagtggatctgggacagatttcactctcaccatcagcagtctgcaacctgaagattttgctacgtactactgtcaacaggatctttatatgcctgtggagttcggccaagggaccaaggtggaaatcaaacgg

SEQ ID NO: 1410 - DNA, 324 bp, Homo sapiens
gacatccagatgacccagtctccatcctccctgtctgcatctgtaggagaccgtgtcaccatcacttgccgggcaagtcagtggattgggccgtatttaaattggtaccagcagaaaccagggaaagcccctaagcccctgatttatatggggtcctataggccgttgggggtcccatcacgtttcagtggcagtggatctgggacagatttcactctcaccatcagcagtctgcaacctgaagattttgctacgtactactgtcaacaggatctttatgggcctggggagttcggccaagggaccaaggtggaaatcaaacgg

SEQ ID NO: 1411 - DNA, 324 bp, Homo sapiens
gacatccagatgacccagtctccatcctccctgtctgcatctgtaggagaccgtgtcaccatcacttgccgggcaagtcagtggattgggccgtatttaaattggtaccagcagaaaccagggaaagcccctaagcccctgatttatatggggtcctataggccgttgggggtcccatcacgtttcagtggcagtggatctgggacagatttcactctcaccatcagcagtctgcaacctgaagattttgctacgtactactgtcaacaggatctttatttgcctttcatgttcggccaagggaccaaggtggaaatcaaacgg

SEQ ID NO: 1412 - DNA, 324 bp, Homo sapiens
gacatccagatgacccagtctccatcctccctgtctgcatctgtaggagaccgtgtcaccatcacttgccgggcaagtcagtggattgggccgtatttaaattggtaccagcagaaaccagggaaagcccctaagcccctgatttatatggggtcctataggccgttgggggtcccatcacgtttcagtggcagtggatctgggacagatttcactctcaccatcagcagtctgcaacctgaagattttgctacgtactactgtcaacaggatctttatgcgccttggaagttcggccaagggaccaaggtggaaatcaaacgg

SEQ ID NO: 1413 - DNA, 324 bp, Homo sapiens
gacatccagatgacccagtctccatcctccctgtctgcatctgtaggagaccgtgtcaccatcacttgccgggcaagtcagtggattgggccgtatttaaattggtaccagcagaaaccagggaaagcccctaagcccctgatctatatggggtcctatagggcgcagggggtcccatcacgtttcagtggcagtggatctgggacagatttcactctcaccatcagcagtctgcaacctgaagattttgctacgtactactgtcaacaggatctttatatgcctgcggagttcggccaagggaccaaggtggaaatcaaacgg

SEQ ID NO: 1414 - DNA, 324 bp, Homo sapiens
gacatccagatgacccagtctccatcctccctgtctgcatctgtaggagaccgtgtcaccatcacttgccgggcaagtcagtggattgggccgtatttaaattggtaccagcagaaaccagggaaagcccctaagcccctgatctatatggggtcctatagggcgcagggggtcccatcacgtttcagtggcagtggatctgggacagatttcactctcaccatcagcagtctgcaacctgaagattttgctacgtactactgtcaacaggatctttatgagcctctcaacttcggccaagggaccaaggtggaaatcaaacgg

SEQ ID NO: 1415 - DNA, 324 bp, Homo sapiens
gacatccagatgacccagtctccatcctccctgtctgcatctgtaggagaccgtgtcaccatcacttgccgggcaagtcagtggattgggccgtatttaaattggtaccagcagaaaccagggaaagcccctaagcccctgatctatatggggtcctatagggcgcagggggtcccatcacgtttcagtggcagtggatctgggacagatttcactctcaccatcagcagtctgcaacctgaagattttgctacgtactactgtcaacaggatctttatatgccttcggagttcggccaagggaccaaggtggaaatcaaacgg

SEQ ID NO: 1416 - DNA, 324 bp, Homo sapiens
gacatccagatgacccagtctccatcctccctgtctgcatctgtaggagaccgtgtcaccatcacttgccgggcaagtcagtggattgggccgtatttaaattggtaccagcagaaaccagggaaagcccctaagcccctgatctatatggggtcctatagggcgcagggggtcccatcacgtttcagtggcagtggatctgggacagatttcactctcaccatcagcagtctgcaacctgaagattttgctacgtactactgtcaacaggatctttatatgcctgtggagttcggccaagggaccaaggtggaaatcaaacgg

SEQ ID NO: 1417 - DNA, 324 bp, Homo sapiens
gacatccagatgacccagtctccatcctccctgtctgcatctgtaggagaccgtgtcaccatcacttgccgggcaagtcagtggattgggccgtatttaaattggtaccagcagaaaccagggaaagcccctaagcccctgatctatatggggtcctatagggcgcagggggtcccatcacgtttcagtggcagtggatctgggacagatttcactctcaccatcagcagtctgcaacctgaagattttgctacgtactactgtcaacaggatctttatgggcctggggagttcggccaagggaccaaggtggaaatcaaacgg

SEQ ID NO: 1418 - DNA, 324 bp, Homo sapiens
gacatccagatgacccagtctccatcctccctgtctgcatctgtaggagaccgtgtcaccatcacttgccgggcaagtcagtggattgggccgtatttaaattggtaccagcagaaaccagggaaagcccctaagcccctgatctatatggggtcctatagggcgcagggggtcccatcacgtttcagtggcagtggatctgggacagatttcactctcaccatcagcagtctgcaacctgaagattttgctacgtactactgtcaacaggatctttatttgcctttcatgttcggccaagggaccaaggtggaaatcaaacgg

SEQ ID NO: 1419 - DNA, 324 bp, Homo sapiens
gacatccagatgacccagtctccatcctccctgtctgcatctgtaggagaccgtgtcaccatcacttgccgggcaagtcagtggattgggccgtatttaaattggtaccagcagaaaccagggaaagcccctaagcccctgatctatatggggtcctatagggcgcagggggtcccatcacgtttcagtggcagtggatctgggacagatttcactctcaccatcagcagtctgcaacctgaagattttgctacgtactactgtcaacaggatctttatgcgccttggaagttcggccaagggaccaaggtggaaatcaaacgg

SEQ ID NO: 1420 - DNA, 324 bp, Homo sapiens
gacatccagatgacccagtctccatcctccctgtctgcatctgtaggagaccgtgtcaccatcacttgccgggcaagtcagtggattgggccgtatttaaattggtaccagcagaaaccagggaaagcccctaagcccctgatctatatggggtcctatttcgcctcgggggtcccatcacgtttcagtggcagtggatctgggacaaatttcactctcaccatcagcagtctgcaacctgaagattttgctacgtactactgtcaacaggatctttatatgcctgcggagttcggccaagggaccaaggtggaaatcaaacgg

SEQ ID NO: 1421 - DNA, 324 bp, Homo sapiens
gacatccagatgacccagtctccatcctccctgtctgcatctgtaggagaccgtgtcaccatcacttgccgggcaagtcagtggattgggccgtatttaaattggtaccagcagaaaccagggaaagcccctaagcccctgatctatatggggtcctatttcgcctcgggggtcccatcacgtttcagtggcagtggatctgggacaaatttcactctcaccatcagcagtctgcaacctgaagattttgctacgtactactgtcaacaggatctttatgagcctctcaacttcggccaagggaccaaggtggaaatcaaacgg

SEQ ID NO: 1422 - DNA, 324 bp, Homo sapiens
gacatccagatgacccagtctccatcctccctgtctgcatctgtaggagaccgtgtcaccatcacttgccgggcaagtcagtggattgggccgtatttaaattggtaccagcagaaaccagggaaagcccctaagcccctgatctatatggggtcctatttcgcctcgggggtcccatcacgtttcagtggcagtggatctgggacaaatttcactctcaccatcagcagtctgcaacctgaagattttgctacgtactactgtcaacaggatctttatatgccttcggagttcggccaagggaccaaggtggaaatcaaacgg

SEQ ID NO: 1423 - DNA, 324 bp, Homo sapiens
gacatccagatgacccagtctccatcctccctgtctgcatctgtaggagaccgtgtcaccatcacttgccgggcaagtcagtggattgggccgtatttaaattggtaccagcagaaaccagggaaagcccctaagcccctgatctatatggggtcctatttcgcctcgggggtcccatcacgtttcagtggcagtggatctgggacaaatttcactctcaccatcagcagtctgcaacctgaagattttgctacgtactactgtcaacaggatctttatatgcctgtggagttcggccaagggaccaaggtggaaatcaaacgg

SEQ ID NO: 1424 - DNA, 324 bp, Homo sapiens
gacatccagatgacccagtctccatcctccctgtctgcatctgtaggagaccgtgtcaccatcacttgccgggcaagtcagtggattgggccgtatttaaattggtaccagcagaaaccagggaaagcccctaagcccctgatctatatggggtcctatttcgcctcgggggtcccatcacgtttcagtggcagtggatctgggacaaatttcactctcaccatcagcagtctgcaacctgaagattttgctacgtactactgtcaacaggatctttatgggcctggggagttcggccaagggaccaaggtggaaatcaaacgg

SEQ ID NO: 1425 - DNA, 324 bp, Homo sapiens
gacatccagatgacccagtctccatcctccctgtctgcatctgtaggagaccgtgtcaccatcacttgccgggcaagtcagtggattgggccgtatttaaattggtaccagcagaaaccagggaaagcccctaagcccctgatctatatggggtcctatttcgcctcgggggtcccatcacgtttcagtggcagtggatctgggacaaatttcactctcaccatcagcagtctgcaacctgaagattttgctacgtactactgtcaacaggatctttatttgcctttcatgttcggccaagggaccaaggtggaaatcaaacgg

SEQ ID NO: 1426 - DNA, 324 bp, Homo sapiens
gacatccagatgacccagtctccatcctccctgtctgcatctgtaggagaccgtgtcaccatcacttgccgggcaagtcagtggattgggccgtatttaaattggtaccagcagaaaccagggaaagcccctaagcccctgatctatatggggtcctatttcgcctcgggggtcccatcacgtttcagtggcagtggatctgggacaaatttcactctcaccatcagcagtctgcaacctgaagattttgctacgtactactgtcaacaggatctttatgcgccttggaagttcggccaagggaccaaggtggaaatcaaacgg

SEQ ID NO: 1427 - DNA, 324 bp, Homo sapiens
gacatccagatgacccagtctccatcctccctgtctgcatctgtaggagaccgtgtcaccatcacttgccgggcaagtcagtggattgggccgtatttaaattggtaccagcagaaaccagggaaagcccctaagctcctgatctatatggggtcctattggtggtccggggtcccatcacgtttcagtggcagtggatctgggacagatttcactctcaccatcagcagtctgcaacctgaagattttgctacgtactactgtcaacaggatctttatatgcctgcggagttcggccaagggaccaaggtggaaatcaaacgg

SEQ ID NO: 1428 - DNA, 324 bp, Homo sapiens
gacatccagatgacccagtctccatcctccctgtctgcatctgtaggagaccgtgtcaccatcacttgccgggcaagtcagtggattgggccgtatttaaattggtaccagcagaaaccagggaaagcccctaagctcctgatctatatggggtcctattggtggtccggggtcccatcacgtttcagtggcagtggatctgggacagatttcactctcaccatcagcagtctgcaacctgaagattttgctacgtactactgtcaacaggatctttatgagcctctcaacttcggccaagggaccaaggtggaaatcaaacgg

SEQ ID NO: 1429 - DNA, 324 bp, Homo sapiens
gacatccagatgacccagtctccatcctccctgtctgcatctgtaggagaccgtgtcaccatcacttgccgggcaagtcagtggattgggccgtatttaaattggtaccagcagaaaccagggaaagcccctaagctcctgatctatatggggtcctattggtggtccggggtcccatcacgtttcagtggcagtggatctgggacagatttcactctcaccatcagcagtctgcaacctgaagattttgctacgtactactgtcaacaggatctttatatgccttcggagttcggccaagggaccaaggtggaaatcaaacgg

SEQ ID NO: 1430 - DNA, 324 bp, Homo sapiens
gacatccagatgacccagtctccatcctccctgtctgcatctgtaggagaccgtgtcaccatcacttgccgggcaagtcagtggattgggccgtatttaaattggtaccagcagaaaccagggaaagcccctaagctcctgatctatatggggtcctattggtggtccggggtcccatcacgtttcagtggcagtggatctgggacagatttcactctcaccatcagcagtctgcaacctgaagattttgctacgtactactgtcaacaggatctttatatgcctgtggagttcggccaagggaccaaggtggaaatcaaacgg

SEQ ID NO: 1431 - DNA, 324 bp, Homo sapiens
gacatccagatgacccagtctccatcctccctgtctgcatctgtaggagaccgtgtcaccatcacttgccgggcaagtcagtggattgggccgtatttaaattggtaccagcagaaaccagggaaagcccctaagctcctgatctatatggggtcctattggtggtccggggtcccatcacgtttcagtggcagtggatctgggacagatttcactctcaccatcagcagtctgcaacctgaagattttgctacgtactactgtcaacaggatctttatgggcctggggagttcggccaagggaccaaggtggaaatcaaacgg

SEQ ID NO: 1432 - DNA, 324 bp, Homo sapiens
gacatccagatgacccagtctccatcctccctgtctgcatctgtaggagaccgtgtcaccatcacttgccgggcaagtcagtggattgggccgtatttaaattggtaccagcagaaaccagggaaagcccctaagctcctgatctatatggggtcctattggtggtccggggtcccatcacgtttcagtggcagtggatctgggacagatttcactctcaccatcagcagtctgcaacctgaagattttgctacgtactactgtcaacaggatctttatttgcctttcatgttcggccaagggaccaaggtggaaatcaaacgg

SEQ ID NO: 1433 - DNA, 324 bp, Homo sapiens
gacatccagatgacccagtctccatcctccctgtctgcatctgtaggagaccgtgtcaccatcacttgccgggcaagtcagtggattgggccgtatttaaattggtaccagcagaaaccagggaaagcccctaagctcctgatctatatggggtcctattggtggtccggggtcccatcacgtttcagtggcagtggatctgggacagatttcactctcaccatcagcagtctgcaacctgaagattttgctacgtactactgtcaacaggatctttatgcgccttggaagttcggccaagggaccaaggtggaaatcaaacgg

SEQ ID NO: 1434 - DNA, 321 bp, Homo sapiens
gacatccagatgacccagtctccatcctccctgtctgcatctgtaggagaccgtgtcaccatcacttgccgggcaagtcagtggattgggccgtatttaaattggtaccagcagaaaccagggaaagcccctaagctcctgatctatatggggtcctatttgcaaagtggggtcccatcacgtttcagtggcagtggatctgggacggatttcactctcaccatcagcagtctgcaacctgaagattttgctacgtactactgtcaacaggatctttatgccccccagttcggccaagggaccaaggtggaaatcaaacgg

SEQ ID NO: 1435 - DNA, 324 bp, Homo sapiens
gacatccagatgacccagtctccatcctccctgtctgcatctgtaggagaccgtgtcaccatcacttgccgggcaagtcagtggattgggccgtatttaaattggtaccagcagaaaccagggaaagcccctaagctcctgatctatatggggtcctattccggctccggggtcccatcaaggttcagtggcagtggatctgggacagatttcactctcaccatcagcagtctgcaacctgaagattttgctacgtactactgtcaacaggatctttatgagcctctcaacttcggccaagggaccaaggtggaaatcaaacgg

SEQ ID NO: 1436 - DNA, 324 bp, Homo sapiens
gacatccagatgacccagtctccatcctccctgtctgcatctgtaggagaccgtgtcaccatcacttgccgggcaagtcagtggattgggccgtacagcaactggtaccagcagaaaccagggaaagcccctaagctcctgatctatatggggtcctatttgcaaagtggggtcccatcacgtttcagtggcagtggatctgggacagatttcactctcaccatcagcagtctgcaacctgaagattttgctacgtactactgtcaacaggatctttatcctccttatacgttcggccaagggaccaaggtggaaatcaaacgg

SEQ ID NO: 1437 - DNA, 324 bp, Homo sapiens
gacatccagatgacccagtctccatcctccctgtctgcatctgtaggagaccgtgtcaccatcacttgccgggcaagtcagtggattgggccgtacaacaactggtaccagcagaaaccagggaaagcccctaagctcctgatctatatggggtcctatttgcaaagtggggtcccatcacgtttcagtggcagtggatctgggacagatttcactctcaccatcagcagtctgcaacctgaagattttgctacgtactactgtcaacaggatctttatcctccttatacgttcggccaagggaccaaggtggaaatcaaacgg

SEQ ID NO: 1438 - DNA, 324 bp, Homo sapiens
gacatccagatgacccagtctccatcctccctgtctgcatctgtaggagaccgtgtcaccatcacttgccgggcaacccagtggattgggccgtatttaaattggtaccaacagaaaccagggaaagcccctaagcccctgatctatatggggtcctatctgccaagtggggtcccatcacgcttcagtggcagtggatctgggacagatttcactctcaccatcagcagtctgcaacctgaagattttgctacgtactactgtcaacaggatctttatcctccttttacgttcggccaagggaccaaggtggaaatcaaacgg

SEQ ID NO: 1439 - DNA, 324 bp, Homo sapiens
gacatccagatgacccagtctccatcctccctgtctgcatctgtaggagaccgtgtcaccatcacttgccgggcaacccagtggattgggccgtatttaaattggtaccaacagaaaccagggaaagcccctaagcccctgatctatatggggtattgggcgccgagtggggtcccatcacgcttcagtggcagtggatctgggacagatttcactctcaccatcagcagtctgcaacctgaagattttgctacgtactactgtcaacaggatctttatcctccttttacgttcggccaagggaccaaggtggaaatcaaacgg

SEQ ID NO: 1440 - DNA, 324 bp, Homo sapiens
gacatccagatgacccagtctccatcctccctgtctgcatctgtaggagaccgtgtcaccatcacttgccgggcaagtcagtggattgggccgtatttaaattggtaccaacagaaaccagggaaagcccctaagcccctgatctatgtggggtattgggcgccgagtggggtcccatcacgcttcagtggcagtggatctgggacagatttcactctcaccatcagcagtctgcaacctgaagattttgctacgtactactgtcaacaggatctttatcctccttttacgttcggccaagggaccaaggtggaaatcaaacgg

SEQ ID NO: 1441 - DNA, 324 bp, Homo sapiens
gacatccagatgacccagtctccatcctccctgtctgcatctgtaggagaccgtgtcaccatcacttgccgggcaagtcagtggattgggccgtatttaaattggtaccaacagaaaccagggaaagcccctaagcccctgatctatatggggtcctatctgccaagtggggtcccatcacgcttcagtggcagtggatctgggacagatttcactctcaccatcagcagtctgcaacctgaagattttgctacgtactactgtcaacaggatctttatttaccttttacgttcggccaagggaccaaggtggaaatcaaacgg

SEQ ID NO: 1442 - DNA, 324 bp, Homo sapiens
gacatccagatgacccagtctccatcctccctgtctgcatctgtaggagaccgtgtcaccatcacttgccgggcaagtcagtggattgggccgtatttaaattggtaccaacagaaaccagggaaagcccctaagcccctgatctatatggggtattgggcgccgagtggggtcccatcacgcttcagtggcagtggatctgggacagatttcactctcaccatcagcagtctgcaacctgaagattttgctacgtactactgtcaacaggatctttatttaccttttacgttcggccaagggaccaaggtggaaatcaaacgg

SEQ ID NO: 1443 - DNA, 324 bp, Homo sapiens
gacatccagatgacccagtctccatcctccctgtctgcatctgtaggagaccgtgtcaccatcacttgccgggcaacccagtggattgggccgtatttaaattggtaccaacagaaaccagggaaagcccctaagcccctgatctatatggggtcctatctgccaagtggggtcccatcacgcttcagtggcagtggatctgggacagatttcactctcaccatcagcagtctgcaacctgaagattttgctacgtactactgtcaacaggatctttatttaccttttacgttcggccaagggaccaaggtggaaatcaaacgg

SEQ ID NO: 1444 - DNA, 324 bp, Homo sapiens
gacatccagatgacccagtctccatcctccctgtctgcatctgtaggagaccgtgtcaccatcacttgccgggcaagtcagtggattgggccgtatttaaattggtaccaacagaaaccagggaaagcccctaagcccctgatctatgtggggtcctatctgccaagtggggtcccatcacgcttcagtggcagtggatctgggacagatttcactctcaccatcagcagtctgcaacctgaagattttgctacgtactactgtcaacaggatctttatcctccttttacgttcggccaagggaccaaggtggaaatcaaacgg

SEQ ID NO: 1445 - DNA, 324 bp, Homo sapiens
gacatccagatgacccagtctccatcctccctgtctgcatctgtaggagaccgtgtcaccatcacttgccgggcaacccagtggattgggccgtatttaaattggtaccaacagaaaccagggaaagcccctaagcccctgatctatgtggggtcctatctgccaagtggggtcccatcacgcttcagtggcagtggatctgggacagatttcactctcaccatcagcagtctgcaacctgaagattttgctacgtactactgtcaacaggatctttatcctccttttacgttcggccaagggaccaaggtggaaatcaaacgg

SEQ ID NO: 1446 - DNA, 324 bp, Homo sapiens
gacatccagatgacccagtctccatcctccctgtctgcatctgtaggagaccgtgtcaccatcacttgccgggcaagtcagtggattgggccgtataacaattggtaccaacagaaaccagggaaagcccctaagcccctgatctatatggggtcctatctgccaagtggggtcccatcacgcttcagtggcagtggatctgggacagatttcactctcaccatcagcagtctgcaacctgaagattttgctacgtactactgtcaacaggatctttatcctccttttacgttcggccaagggaccaaggtggaaatcaaacgg

SEQ ID NO: 1447 - DNA, 324 bp, Homo sapiens
gacatccagatgacccagtctccatcctccctgtctgcatctgtaggagaccgtgtcaccatcacttgccgggcaagtcagtggattgggccgtataacaattggtaccaacagaaaccagggaaagcccctaagcccctgatctatatggggtattgggcgccgagtggggtcccatcacgcttcagtggcagtggatctgggacagatttcactctcaccatcagcagtctgcaacctgaagattttgctacgtactactgtcaacaggatctttatcctccttttacgttcggccaagggaccaaggtggaaatcaaacgg

SEQ ID NO: 1448 - DNA, 324 bp, Homo sapiens
gacatccagatgacccagtctccatcctccctgtctgcatctgtaggagaccgtgtcaccatcacttgccgggcaacccagtggattgggccgtataacaattggtaccagcagaaaccagggaaagcccctaagcccctgatctatatggggtcctatctgccaagtggggtcccatcacgcttcagtggcagtggatctgggacagatttcactctcaccatcagcagtctgcaacctgaagattttgctacgtactactgtcaacaggatctttatcctccttttacgttcggccaagggaccaaggtggaaatcaaacgg

SEQ ID NO: 1449 - DNA, 324 bp, Homo sapiens
gacatccagatgacccagtctccatcctccctgtctgcatctgtaggagaccgtgtcaccatcacttgccgggcaagtcagtggattgggccgtatagcaattggtaccaacagaaaccagggaaagcccctaagcccctgatctatatggggtcctatctgccaagtggggtcccatcacgcttcagtggcagtggatctgggacagatttcactctcaccatcagcagtctgcaacctgaagattttgctacgtactactgtcaacaggatctttatcctccttttacgttcggccaagggaccaaggtggaaatcaaacgg

SEQ ID NO: 1450 - DNA, 324 bp, Homo sapiens
  unsure 95: n = unknown
gacatccagatgacccagtctccatcctccctgtctgcatctgtaggagaccgtgtcaccatcacttgccgggcaagtcagtggattgggccgtntagcaattggtaccaacagaaaccagggaaagcccctaagcccctgatctatatggggtattgggcgccgagtggggtcccatcacgcttcagtggcagtggatctgggacagatttcactctcaccatcagcagtctgcaacctgaagattttgctacgtactactgtcaacaggatctttatcctccttttacgttcggccaagggaccaaggtggaaatcaaacgg

SEQ ID NO: 1451 - DNA, 324 bp, Homo sapiens
gacatccagatgacccagtctccatcctccctgtctgcatctgtaggagaccgtgtcaccatcacttgccgggcaacccagtggattgggccgtatagcaattggtaccaacagaaaccagggaaagcccctaagcccctgatctatatggggtcctatctgccaagtggggtcccatcacgcttcagtggcagtggatctgggacagatttcactctcaccatcagcagtctgcaacctgaagattttgctacgtactactgtcaacaggatctttatcctccttttacgttcggccaagggaccaaggtggaaatcaaacgg

SEQ ID NO: 1452 - DNA, 324 bp, Homo sapiens; identical to SEQ ID NO: 425

SEQ ID NO: 1453 - DNA, 324 bp, Homo sapiens; identical to SEQ ID NO: 426

SEQ ID NO: 1454 - DNA, 324 bp, Homo sapiens; identical to SEQ ID NO: 427

SEQ ID NO: 1455 - DNA, 324 bp, Homo sapiens; identical to SEQ ID NO: 428

SEQ ID NO: 1456 - DNA, 324 bp, Homo sapiens; identical to SEQ ID NO: 429

SEQ ID NO: 1457 - DNA, 324 bp, Homo sapiens; identical to SEQ ID NO: 430

SEQ ID NO: 1458 - DNA, 324 bp, Homo sapiens
gacatccagatgacccagtctccatcctccctgtctgcatctgtaggagaccgtgtcaccatcacttgccgggcaagtcagtggattgggccgtatttaaattggtaccaacagaaaccagggaaagcccctaagcccctgatctatatggggtattgggcgccgagtggggtcccatcacgcttcagtggcagtggatctgggacagatttcactctcaccatcagcagtctgcaacctgaagattttgctacgtactactgtcaacaggatggcagggccccttttacgttcggccaagggaccaaggtggaaatcaaacgg

SEQ ID NO: 1459 - DNA, 324 bp, Homo sapiens
gacatccagatgacccagtctccatcctccctgtctgcatctgtaggagaccgtgtcaccatcacttgccgggcaagtcagtggattgggccgtatttaaattggtaccaacagaaaccagggaaagcccctaagcccctgatctatatggggtcctatctgccaagtggggtcccatcacgcttcagtggcagtggatctgggacagatttcactctcaccatcagcagtctgcaacctgaagattttgctacgtactactgtcaacaggacttgtggcctccttttacgttcggccaagggaccaaggtggaaatcaaacgg

SEQ ID NO: 1460 - DNA, 324 bp, Homo sapiens
gacatccagatgacccagtctccatcctccctgtctgcatctgtaggagaccgtgtcaccatcacttgccgggcaagtcagtggattgggccgtatttaaattggtaccaacagaaaccagggaaagcccctaagcccctgatctatatggggtcctatctgccaagtggggtcccatcacgcttcagtggcagtggatctgggacagatttcactctcaccatcagcagtctgcaacctgaagattttgctacgtactactgtcaacaggatctcttccccccttttacgttcggccaagggaccaaggtggaaatcaaacgg

SEQ ID NO: 1461 - DNA, 324 bp, Homo sapiens
gacatccagatgacccagtctccatcctccctgtctgcatctgtaggagaccgtgtcaccatcacttgccgggcaagtcggtggattgggccgtatttaaattggtaccaacagaaaccagggaaagcccctaagcccctgatctatatggggtcctatctgccaagtggggtcccatcacgcttcagtggcagtggatctgggacagatttcactctcaccatcagcagtctgcaacctgaagattttgctacgtactactgtcaacaggacgtcttccctccttttacgttcggccaagggaccaaggtggaaatcaaacgg

SEQ ID NO: 1462 - DNA, 324 bp, Homo sapiens
gacatccagatgacccagtctccatcctccctgtctgcatctgtaggagaccgtgtcaccatcacttgccgggcaagtcagtggattgggccgtatttaaattggtaccaacagaaaccagggaaagcccctaagcccctgatctatatggggtcctatctgccaagtggggtcccatcacgcttcagtggcagtggatctgggacagatttcactctcaccatcagcagtctgcaacctgaagattttgctacgtactactgtcaacaggatgggtgggccccttttacgttcggccaagggaccaaggtggaaatcaaacgg

SEQ ID NO: 1463 - DNA, 324 bp, Homo sapiens
gacatccagatgacccagtctccatcctccctgtctgcatctgtaggagaccgtgtcaccatcacttgccgggcaagtcagtggattgggccgtatttaaattggtaccaacagaaaccagggaaagcccctaagcccctgatctatatggggtcctatctgccaagtggggtcccatcacgcttcagtggcagtggatctgggacagatttcactctcaccatcagcagtctgcaacctgaagattttgctacgtactactgtcaacaggacgtctcccctccttttacgttcggccaagggaccaaggtggaaatcaaacgg

SEQ ID NO: 1464 - DNA, 324 bp, Homo sapiens
gacatccagatgacccagtctccatcctccctgtctgcatctgtaggagaccgtgtcaccatcacttgccgggcaagtcagtggattgggccgtatttaaattggtaccaacagaaaccagggaaagcccctaagcccctgatctatatggggtcctatctgccaagtggggtcccatcacgcttcagtggcagtggatctgggacagatttcactctcaccatcagcagtctgcaacctgaagattttgctacgtactactgtcaacaggacatgtcccctccttttacgttcggccaagggaccaaggtggaaatcaaacgg

SEQ ID NO: 1465 - DNA, 324 bp, Homo sapiens
gacatccagatgacccagtctccatcctccctgtctgcatctgtaggagaccgtgtcaccatcacttgccgggcaagtcagtggattgggccgtatttaaattggtaccaacagaaaccagggaaagcccctaagcccctgatctatatggggtcctatctgccaagtggggtcccatcacgcttcagtggcagtggatctgggacagatttcactctcaccatcagcagtctgcaacctgaagattttgctacgtactactgtcaacaggatctgctccccccttttacgttcggccaagggaccaaggtggaaatcaaacgg

SEQ ID NO: 1466 - DNA, 324 bp, Homo sapiens
gacatccagatgacccagtctccatcctccctgtctgcatctgtaggagaccgtgtcaccatcacttgccgggcaagtcagtggattgggccgtatttaaattggtaccaacagaaaccagggaaagcccctaagcccctgatctatatggggtcctatctgccaagtggggtcccatcacgcttcagtggcagtggatctgggacagatttcactctcaccatcagcagtctgcaacctgaagatttcgctacgtactactgtcaacaggatttgttcgtcccttttacgttcggccaagggaccaaggtggaaatcaaacgg

SEQ ID NO: 1467 - DNA, 324 bp, Homo sapiens
gacatccagatgacccagtctccatcctccctgtctgcatctgtaggagaccgtgtcaccatcacttgccgggcaagtcagtggattgggccgtatttaaattggtaccaacagaaaccagggaaagcccctaagcccctgatctatatggggtcctatctgccaagtggggtcccatcacgcttcagtggcagtggatctgggacagatttcactctcaccatcagcagtctgcaacctgaagattttgctacgtactactgtcaacaggatctggtcccgccttttacgttcggccaagggaccaaggtggaaatcaaacgg

SEQ ID NO: 1468 - DNA, 324 bp, Homo sapiens; identical to SEQ ID NO: 1467

SEQ ID NO: 1469 - DNA, 324 bp, Homo sapiens
gacatccagatgacccagtctccatcctccctgtctgcatctgtaggagaccgtgtcaccatcacttgccgggcaagtcagtggattgggccgtatttaaattggtaccaacagaaaccagggaaagcccctaagcccctgatctatatggggtcctatctgccaagtggggtcccatcacgcttcagtggcagtggatctgggacagatttcactctcaccatcagcagtctgcaacctgaagattttgctacgtactactgtcaacaggatctttatccgcctttcttcttcggccaagggaccaaggtggaaatcaaacgg

SEQ ID NO: 1470 - DNA, 324 bp, Homo sapiens
gacatccagatgacccagtctccatcctccctgtctgcatctgtaggagaccgtgtcaccatcacttgccgggcaagtcagtggattgggccgtatttaaattggtaccaacagaaaccagggaaagcccctaagcccctgatctatatggggtcctatctgccgagtggggtcccatcacgcttcagtggcagtggatctgggacagatttcactctcaccatcagcagtctgcaacctgaagattttgctacgtactactgtcaacaggatttttatcctccttttacgttcggccaagggaccaaggtggaaatcaaacgg

SEQ ID NO: 1471 - DNA, 324 bp, Homo sapiens
gacatccagatgacccagtctccatcctccctgtctgcatctgtaggagaccgtgtcaccatcacttgccgggcaagtcagtggattgggccgtatttaaattggtaccaacagaaaccagggaaagcccctaagcccctgatctatatggggtcctatctgccaagtggggtcccatcacgcttcagtggcagtggatctgggacagatttcactctcaccatcagcagtctgcaacctgaagattttgctacgtactactgtcaacaggatctcctccccccttttacgttcggccaagggaccaaggtggaaatcaaacgg

SEQ ID NO: 1472 - DNA, 324 bp, Homo sapiens
gacatccagatgacccagtctccatcctccctgtctgcatctgtaggagaccgtgtcaccatcacttgccgggcaagtcagtggattgggccgtatttaaattggtaccaacaggaaccagggaaagcccctaagcccctgatctatatggggtcctatctgccaagtggggtcccatcacgcttcagtggcagtggatctgggacagatttcactctcaccatcagcagtctgcaacctgaagattttgctacgtactactgtcaacaggatgcctcccccccttttacgttcggccaagggaccaaggtggaaatcaaacgg

SEQ ID NO: 1473 - DNA, 324 bp, Homo sapiens
gacatccagatgacccagtctccatcctccctgtctgcatctgtaggagaccgtgtcaccatcacttgccgggcaagtcagtggattgggccgtatttaaattggtaccaacagaaaccagggaaagcccctaagcccctgatctatatggggtcctatctgccaagtggggtcccatcacgcttcagtggcagtggatctgggacagatttcactctcaccatcagcagtctgcaacctgaagattttgctacgtactactgtcagcaggacgtgtaccctccttttacgttcggccaagggaccaaggtggaaatcaaacgg

SEQ ID NO: 1474 - DNA, 324 bp, Homo sapiens
gacatccagatgacccagtctccatcctccctgtctgcatctgtaggagaccgtgtcaccatcacttgccgggcaagtcagtggattgggccgtatttaaattggtaccaacagaaaccagggaaagcccctaagcccctgatctatatggggtcctatctgccaaatggggtcccatcacgcttcagtggcagtggatctgggacagatttcactctcaccatcagcagtctgcaacctgaagattttgctacgtactactgtcaacaggatctgatccccccttttacgttcggccaggggaccaaggtggaaatcaaacgg

SEQ ID NO: 1475 - DNA, 324 bp, Homo sapiens
gacatccagatgacccagtctccatcctccctgtccgcatctgtaggagaccgtgtcaccatcacttgccgggcaagtcagtggattgggccgtatttaaattggtaccaacagaaaccagggaaagcccctaagcccctgatctatatggggtcctatctgccaagtggggtcccatcacgcttcagtggcagtggatctgggacagatttcactctcaccatcagcagtctgcaacctgaagattttgctacgtactactgtcaacaggatatctacccgccttttacgttcggccaagggaccaaggtggaaatcaaacgg

SEQ ID NO: 1476 - DNA, 324 bp, Homo sapiens
gacatccagatgacccagtctccatcctccctgtctgcatctgtaggagaccgtgtcaccatcacttgccgggcaagtcagtggattgggccgtatttaaattggtaccaacagaagccagggaaagcccctaagcccctgatctatatggggtcctatctgccaagtggggtcccatcacgcttcagtggcagtggatctgggacagatttcactctcaccatcagcagtctgcaacctgaagattttgctacgtactactgtcaacaggatctgttgagcccttttacgttcggccaagggaccaaggtggaaatcaaacgg

SEQ ID NO: 1477 - DNA, 324 bp, Homo sapiens
gacatccagatgacccagtctccatcctccctgtctgcatctgtaggagaccgtgtcaccatcacttgccgggcaagtcagtggattgggccgtatttaaattggtaccaacagaaaccagggaaagcccctaagcccctgatctatatggggtattgggcgccgagtggggtcccatcacgcttcagtggcagtggatctgggacagatttcactctcaccatcagcagtctgcaacctgaagattttgctacgtactactgtcaacaggatgtcttcttcccttttacgttcggccaagggaccaaggtggaaatcaaacgg

SEQ ID NO: 1478 - DNA, 324 bp, Homo sapiens
gacatccagatgacccagtctccatcctccctgtctgcatctgtaggggaccgtgtcaccatcacttgccgggcaagtcagtggattgggccgtatttaaattggtaccaacagaaaccagggaaagcccctaagcccctgatttatatggggtattgggcgccgagtggggtcccatcacgcttcagtggcagtggatctgggacagatttcactctcaccatcagcagtctgcaacctgaagattttgctacgtactactgtcaacaggatttgttcgtcccttttacgttcggccaagggaccaaggtggaaatcaaacgg

SEQ ID NO: 1479 - DNA, 324 bp, Homo sapiens
gacatccagatgacccagtctccatcctccctgtctgcatctgtaggagaccgtgtcaccatcacttgccgggcaagtcagtggattgggccgtatttaaattggtaccaacagaaaccagggaaagcccctaagcccctgatctatatggggtattgggcgccgagtggggtcccatcacgcttcagtggcagtggatctgggacagatttcactctcaccatcagcagtctgcaacctgaagattttgctacgtactactgtcaacaggatctcttcttcccttttacgttcggccaagggaccaaggtggaaatcaaacgg

SEQ ID NO: 1480 - DNA, 324 bp, Homo sapiens
gacatccagatgacccagtctccatcctccctgtctgcatctgtaggagaccgtgtcaccatcacttgccgggcaagtcagtggattgggccgtatttaaattggtaccaacagaaaccagggaaagcccctaagcccctgatctatatggggtattgggcgccgagtggggtcccatcacgcttcagtggcagtggatctgggacagatttcactctcaccatcagcagtctgcaacctgaagattttgctacgtactactgtcaacaggatgtcgtccccccttttacgttcggccaagggaccaaggtggaaatcaaacgg

SEQ ID NO: 1481 - DNA, 324 bp, Homo sapiens
gacatccagatgacccagtctccatcctccctgtctgcatctgtaggagaccgtgtcaccatcacttgccgggcaagtcagtggattgggccgtatttaaattggtaccaacagaaaccagggaaagcccctaagcccctgatctatatggggtattgggcgccgagtggggtcccatcacgcttcagtggcagtggatctgggacagatttcactctcaccatcagcagtctgcaacctgaagattttgctacgtactactgtcaacaggatatgttccccccttttacgttcggccaagggaccaaggtggaaatcaaacgg

SEQ ID NO: 1482 - DNA, 324 bp, Homo sapiens
gacatccagatgacccagtctccatcctccctgtctgcatctgtaggagaccgtgtcaccatcacttgccgggcaagtcagtggattgggccgtatttaaattggtaccaacagaaaccagggaaagcccctaagcccctgatctatatggggtattgggcgccgagtggggccccatcacgcttcagtggcagtggatctgggacagatttcactctcaccatcagcagtctgcaacctgaagattttgctacgtactactgtcaacaggatttctacccgccttttacgttcggccaagggaccaaggtggaaatcaaacgg

SEQ ID NO: 1483 - DNA, 324 bp, Homo sapiens
gacatccagatgacccagtctccatcctccctgtctgcatctgtaggagaccgtgtcaccatcacttgccgggcaagtcagtggattgggccgtatttaaattggtaccaacagaaaccagggaaagcccctaagcccctgatctatatggggtattgggcgccgagtggggtcccatcacgcttcagtggcagtggatctgggacagatttcactctcaccatcagcagtctgcaacctgaagattttgctacgtactactgtcaacaggatatcctccccccttttacgttcggccaagggaccaaggtggaaatcaaacga

SEQ ID NO: 1484 - DNA, 324 bp, Homo sapiens
gacatccagatgacccagtctccatcctccctgtctgcatctgtaggagaccgtgtcaccatcacttgccgggcaagtcagtggattgggccgtatttaaattggtaccaacagaaaccagggaaagcccctaagcccctgatctatatggggtattgggcgccgagtggggtcccatcacgcttcagtggcagtggatctgggacagatttcactctcaccatcagcagtctgcaacctgaagattttgctacgtactactgtcaacaggatgtcctccccccttttacgttcggccaagggaccaaggtggaaatcaaacgg

SEQ ID NO: 1485 - DNA, 324 bp, Homo sapiens
gacatccagatgacccagtctccatcctccctgtctgcatctgtaggagaccgtgtcaccatcacttgccgggcaagtcagtggattgggccgtatttaaattggtaccaacagaaaccagggaaagcccctaagcccctgatctatatggggtattgggcgccgagtggggtcccatcacgcttcagtggcagtggatctgggacagatttcactctcaccatcagcagtctgcaacctgaagattttgctacgtactactgtcaacaggatctctacttcccttttacgttcggccaagggaccaaggtggaaatcaaacgg

SEQ ID NO: 1486 - DNA, 324 bp, Homo sapiens
gacatccagatgacccagtctccatcctccctgtctgcatctgtaggagaccgtgtcaccatcacttgccgggcaagtcagtggattgggccgtatttaaattggtaccaacagaaaccagggaaagcccctaagcccctgatctatatggggtattgggcgccgagtggggtcccatcacgcttcagtggcagtggatctgggacagatttcactctcaccatcagcagtctgcaacctgaagattttgctacgtactactgtcaacaggatctcctccccccttttacgttcggccaagggaccaaggtggaaatcaaacgg

SEQ ID NO: 1487 - DNA, 323 bp, Homo sapiens
gacatccagatgacccagtctccatcctccctgtctgcatctgtaggagaccgtgtcaccatcacttgccgggcaagtcagtggattgggccgtatttaaattggtaccaacagaaaccagggaaagcccctaagcccctgatctatatggggtattgggcgccgagtggggtcccatcacgcttcagtggcagtggatctgggacagatttcactctcaccatcagcagtctgcaacctgaagattttgctacgtactactgtcaacaggatctggtgccccctttacgttcggccaagggaccaaggtggaaatcaagcgg

SEQ ID NO: 1488 - DNA, 324 bp, Homo sapiens
gacatccagatgacccagtctccatcctccctgtctgcatctgtaggagaccgtgtcaccatcacttgccgggcaagtcagtggattgggccgtatttaaattggtaccaacagaaaccagggaaagcccctaagcccctgatctatatggggtattgggcgccgggtggggtcccatcacgcttcagtggcagtggatctgggacagatttcactctcaccatcggcagtctgcaacctgaagattttgctacgtactactgtcaacaggatgtcacgcccccttttacgttcggccaagggaccaaggtggaaatcaaacgg

SEQ ID NO: 1489 - DNA, 324 bp, Homo sapiens
gacatccagatgacccagtctccatcctccctgtctgcatctgtaggagaccgtgtcaccatcacttgccgggcaagtcagtggattgggccgtatttaaattggtaccaacagaaaccagggaaagcccctaagcccctgatctatatggggtattgggcgccgagtggggtcccatcacgcttcagtggcagtggatctgggacagatttcactctcaccatcagcagtctgcaacctgaagattttgctacgtactactgtcaacaggatgtctacccgccttttacgttcggccaagggaccaaggtggaaatcaaacgg

SEQ ID NO: 1490 - DNA, 324 bp, Homo sapiens
gacatccagatgacccagtctccatcctccctgtctgcatctgtaggagaccgtgtcaccatcacttgccgggcaagtcagtggattgggccgtatttaaattggtaccaacagaaaccagggaaagcccctaagcccctgatctatatggggtattgggcgccgagtggggtcccatcacgcttcagtggcagtggatctgggacagatttcactctcaccatcagcagtctgcaacctgaagattttgctacgtactactgtcaacaggatgtgttgtggccttttacgttcggccaagggaccaaggtggaaatcaaacgg

SEQ ID NO: 1491 - DNA, 324 bp, Homo sapiens
gacatccagatgacccagtctccatcctccctgtctgcatctgtaggagaccgtgtcaccatcacttgccgggcaagtcagtggattgggccgtatttaaattggtaccaacagaaaccagggaaagcccctaagcccctgatctatatggggtattgggcgccgagtggggtcccatcacgcttcagtggcagtggatctgggacagatttcactctcaccatcagcagtctgcaacctgaagattttgctacgtactactgtcaacaggatttctacttcccttttacgttcggccaagggaccaaggtggaaatcaaacgg

SEQ ID NO: 1492 - DNA, 324 bp, Homo sapiens
gacatccagatgacccagtctccatcctccctgtctgcatctgtaggagaccgtgtcaccatcacttgccgggcaagtcagtggattgggccgtatttaaattggtaccaacagaaaccagggaaagcccctaagcccctgatctatatggggtattgggcgccgagtggggtcccatcacgcttcagtggcagtggatctgggacagatttcactctcaccatcagcagtctgcaacctgaagattttgctacgtactactgtcaacaggatagctcccccccttttacgttcggccaagggaccaaggtggaaatcaaacgg

SEQ ID NO: 1493 - DNA, 324 bp, Homo sapiens
gacatccagatgacccagtctccatcctccctgtctgcatctgtaggagaccgtgtcaccatcacttgccgggcaagtcagtggattgggccgtatttaaattggtaccaacagaaaccagggaaagcccctaagcccctgatctatatggggtattgggcgccgagtggggtcccatcacgcttcagtggcagtggatctgggacagatttcactctcaccatcagcagtctgcaacctgaagattttgctacgtactactgtcaacaggatatctacccgccttttacgttcggccaagggaccaaggtggaaatcaaacgg

SEQ ID NO: 1494 - DNA, 324 bp, Homo sapiens
gacatccagatgacccagtctccatcctccctgcctgcatctgtaggagaccgtgtcaccatcacttgccgggcaagtcagtggattgggccgtatttaaattggtaccaacagaaaccagggaaagcccctaagcccctgatctatatggggtattgggcgccgagtggggtcccatcacgcttcagtggcagtggatctgggacagatttcactctcaccatcagcagtctgcaacctgaagattttgctacgtactactgtcaacaggatctgaaggccccttttacgttcggccaagggaccaaggtggaaatcaaacgg

SEQ ID NO: 1495 - DNA, 324 bp, Homo sapiens
gacatccagatgacccagtctccatcctccctgtctgcatctgtaggagaccgtgtcaccatcacttgccgggcaagtcagtggattgggccgtatttaaattggtaccaacagaaaccagggaaagcccctaagcccctgatctatatggggtattgggcgccgagtggggtcccatcacgcttcagtggcagtggatctgggacagatttcactctcaccatcagcagtctgcaacctgaagattttgctacgtactactgtcaacaggatcacctccccccttttacgttcggccaagggaccaaggtggaaatcaaacgg

SEQ ID NO: 1496 - DNA, 324 bp, Homo sapiens
gacatccagatgacccagtctccatcctccctgtctgcatctgtaggagaccgtgtcaccatcacttgccgggcaagtcagtggattgggccgtatttaaattggtaccaacagaaaccagggaaagcccctaagcccctgatctatatggggtattgggcgccgagtggggtcccatcacgcttcagtggcagtggatctgggacagatttcactctcaccatcagcagtctgcaacctgaagattttgctacgtactactgtcaacaggatttgttgccgccttttacgttcggccaagggaccaaggtggaaatcaaacgg

SEQ ID NO: 1497 - DNA, 324 bp, Homo sapiens
gacatccagatgacccagtctccatcctccctgtctgcatctgtaggagaccgtgtcaccatcacttgccgggcaagtcagtggattgggccgtatttaaattggtaccaacagaaaccagggaaagcccctaagcccctgatctatatggggtattgggcgccgagtggggtcccatcacgcttcagtggcagtggatctgggacagatttcactctcaccatcagcagtctgcaacctgaagattttgctacgtactactgtcaacaggatctcttccccccttttacgttcggccaagggaccaaggtggaaatcaaacgg

SEQ ID NO: 1498 - DNA, 324 bp, Homo sapiens
gacatccagatgacccagtctccatcctccctgtctgcatctgtaggagaccgtgtcaccatcacttgccgggcaagtcagtggattgggccgtatttaaattggtaccaacagaaaccagggaaagcccctaagcccctgatctatatggggtattgggcgccgagtggggtcccatcacgcttcagtggcagtggatctgggacagatttcactctcaccatcagcagtctgcaacctgaagattttgctacgtactactgtcaacaggatgtcttccccccttttacgttcggccaagggaccaaggtggaaatcaaacgg

SEQ ID NO: 1499 - DNA, 324 bp, Homo sapiens; identical to SEQ ID NO: 1472

SEQ ID NO: 1500 - DNA, 324 bp, Homo sapiens
gacatccagatgacccagtctccatcctccctgtctgcatctgtaggagaccgtgtcaccatcacttgccgggcaagtcagtggattgggccgtatttaaattggtaccaacagaaaccagggaaagcccctaagcccctgatctatatggggtattgggcgccgagtggggtcccatcacgcttcagtggcagtggatctgggacagatttcactctcaccatcagcagtctgcaacctgaagattttgctacgtactactgtcaacaggatgggggggagccttttacgttcggccaagggaccaaggtggaaatcaaacgg

SEQ ID NO: 1501 - DNA, 324 bp, Homo sapiens
gacatccagatgacccagtctccatcctccctgtctgcatctgtaggagaccgtgtcaccatcacttgccgggcaagtcagtggattgggccgtatttaaattggtaccagcagaaaccggggaaagcccctaagctcctgatctatatggggtactgggcccaaagtggggtcccatcacgtttcagtggcagtggatctgggacagatttcactctcaccatcagcagtctgcaacctgaagattttgctacgtactactgtcaacaggatctttatcctccttatacgttcggccaagggaccaaggtggaaatcaaacgg

SEQ ID NO: 1502 - DNA, 325 bp, Homo sapiens
gacatccagatgacccagtctccatcctccctgtctgcatctgtaggagaccgtgtcaccatcacttgccgggcaagtcagaatattgataattatttatattggtaccagcagaaaccagggaaggcccctaggctcctgatctatcgggcttcctatttgcaaagtggggtcccatcacgtttcagtggcagtggatctgggacagatttcactctcaccatcagcagtctgcaacctgaagattttgctacgtactactgtcaacagcttgctattctgcctattacgttcggccaagggaccaaggtggaaatcaaacggg

SEQ ID NO: 1503 - DNA, 325 bp, Homo sapiens
gacatccagatgacccagtctccatcctccctgtctgcatctgtaggagaccgtgtcaccatcacttgccgggcaagtcagacgattgattgggggttaaattggtaccagcagaaaccagggaaagcccctaagctcctgatctatactacttccagtttgcaaagtggggtcccatcacgtttcagtggcagtggatctgggacagatttcactctcaccatcagcagtctgcaacctgaagattttgctacgtactactgtcaacaggattcttggcatcctccgacgttcggccaagggaccaaggtggaaatcaaacggg

SEQ ID NO: 1504 - DNA, 327 bp, Homo sapiens
gacatccagatgacccagtctccatcctccctgtctgcatctgtaggagaccgtgtcaccatcacttgccgggcaagtcagtcgattgcgtgggatttacattggtatcagcagaaaccagggaaagcccctaagctcctgatctatgatatgtccatgttgcaaagtggggtcccatcacgtttcagtggcagtggatctgggacagatttcactctcaccatcagcagtctgcaacctgaagattttgctacgtactactgtcaacagacttatcggcttcctatgacgttcggccaagggaccaaggtgaaatcaaacgggcgg

SEQ ID NO: 1505 - DNA, 325 bp, Homo sapiens
gacatccagatgacccagtctccatcctccctgtctgcatctgtaggagaccgtgtcaccatcacttgccgggcaagtcagtggattatgatgcatttaaattggtatcagcagaaaccagggaaagcccctaagctcctgatctataatggttccgtgttgcaaagtggggtcccatcacgtttcagtggcagtggatctgggacagatttcactctcaccatcagcagtctgcaacctgaagattttgctacgtactactgtcaacaggatatttttcatcctcctacgttcggccaagggaccaaggtggaaatcaaacggg

SEQ ID NO: 1506 - DNA, 325 bp, Homo sapiens
gacatccagttgacccagtctccatcctccctgtctgcatctgtaggagaccgtgtcaccatcacttgccgggcaagtcagcgtattccgtgggatttacattggtaccagcagaaaccagggaaagcccctaagctcctgatctatgatgcttcccgtttgcaaagtggggtcccatcacgtttcagtggcagtggatctgggacagatttcactctcaccatcagcagtctgcaacctgaagattttgctacgtactactgtcaacagacgtattctttgcctttcacgttcggccaagggaccaaggtggaaatcaaacggg

SEQ ID NO: 1507 - DNA, 324 bp, Homo sapiens
gacatccagttgacccagtctccatcctccctgtctgcatctgtaggagaccgtgtcaccatcacttgccgggcaagtcagcgtattccgtgggatttacattggtaccagcagaaaccagggaaagcccctaagctcctgatctatgatacttcccgtttacaaagtggggtcccatcacgtttcagtggcagtggatctgggacagatttcactctcaccatcagcagtctgcaacctgaagattttgctacgtactactgtcaacagacgtattctttgcctttcacgttcggccaagggaccaaggtggaaatcaaacgg

SEQ ID NO: 1508 - protein, 108 aa, Homo sapiens
DIQMTQSPSSLSASVGDRVTITCRASQWIGPYLEWYQQKPGKAPKLLIYTSSFLQSGVPSRFSGSGSGTDFTLTISSLQPEDFATYYCQQSVFIPYTFGQGTKVEIKR

SEQ ID NO: 1509 - protein, 108 aa, Homo sapiens
DIQMTQSPSSLSASVGDRVTITCRASQSIAWDLHWYQQKPGKAPKLLIYDMSMLQSGVPSRFSGSGSGTDFTLTISSLQPEDFATYYCQQSYVLPFTFGQGTKVEIKR

SEQ ID NO: 1510 - protein, 108 aa, Homo sapiens
DIQMTQSPSSLSASVGDRVTITCRASQWIGPYLNWYQQKPGKAPKLLIYMGSYLQSGVPSRFSGSGSGTDFTLTISSLQPEDFATYYCQQDLYPPYTFGQGTKVEIKR

SEQ ID NO: 1511 - protein, 108 aa, Homo sapiens
DIQMTQSPSSLSASVGDRVTITCRASQWIGPYLNWYQQKPGKAPKPLIYMGSYLQSGVPSRFSGSGSGTDFTLTISSLQPEDFATYYCQQDLYPPYTFGQGTKVEIKR

SEQ ID NO: 1512 - protein, 108 aa, Homo sapiens
DIQMTQSPSSLSASVGDRVTITCRASQWIGPYLNWYQQKPGKAPKLLIYMGSYLPSGVPSRFSGSGSGTDFTLTISSLQPEDFATYYCQQDLYPPYTFGQGTKVEIKR

SEQ ID NO: 1513 - protein, 108 aa, Homo sapiens
DIQMTQSPSSLSASVGDRVTITCRASQWIGPYLNWYQQKPGKAPKLLIYMGSYLQSGVPSRFSGSGSGTDFTLTISSLQPEDFATYYCQQDLYPPFTFGQGTKVEIKR

SEQ ID NO: 1514 - protein, 108 aa, Homo sapiens
DIQMTQSPSSLSASVGDRVTITCRASQWIGPYLNWYQQKPGKAPKLLIYVGSYLHSGVPSRFSGSGSGTDFTLTISSLQPEDFATYYCQQDLYPPYTFGQGTKVEIKR

SEQ ID NO: 1515 - protein, 108 aa, Homo sapiens
DIQMTQSPSSLSASVGDRVTITCRASQWIGPYLNWYQQKPGKAPKLLIYMGSYLVSGVPSRFSGSGSGTDFTLTISSLQPEDFATYYCQQDLYPPYTFGQGTKVEIKR

SEQ ID NO: 1516 - protein, 108 aa, Homo sapiens
DIQMTQSPSSLSASVGDRVTITCRASQWIGPYLNWYQQKPGKAPKLLIYMGSYLSSGVPSRFSGSGSGTDFTLTISSLQPEDFATYYCQQDLYPPYTFGQGTKVEIKR

SEQ ID NO: 1517 - protein, 108 aa, Homo sapiens
  VARIANT 23: Xaa = Any Amino Acid
DIQMTQSPSSLSASVGDRVTITXRASQWIGPYLNWYQQKPGKAPKLLIYMGSYLQSGVPSRFSGSGSGTDFTLTISSLQPEDFATYYCQQDLYPPFTLGQGTKVEIKR

SEQ ID NO: 1518 - protein, 108 aa, Homo sapiens
  VARIANT 23: Xaa = Any Amino Acid
DIQMTQSPSSLSASVGDRVTITXRASQWIGPYLNWYQQKPGKAPKLLIYMGSYLQSGVPSRFSGSGSGTDLTLTISSLQPEDFATYYCQQDLYPPYTFGQGTKVEIKR

SEQ ID NO: 1519 - protein, 108 aa, Homo sapiens
DIQMTQSPSSLSASVGDRVTITCRASQWIGPYLNWYQQKPGKAPKLLIYMGSYLQSGVPSRFSGSGSGTDFTLTISSLQPKDFATYYCQQDLYPPYTFGQGTKVEIKR

SEQ ID NO: 1520 - protein, 108 aa, Homo sapiens
DIQMTQSPSSLSASVGDRVTITCQASQWIGPYLNWYQQKPGKAPKLLMYMGSYLQSGVPSRFSGSGSGTDFTFTISSLQPEDFATYYCQQDLYLPYTSGQGTKVEIKR

SEQ ID NO: 1521 - protein, 108 aa, Homo sapiens
DIQMTQSPSSLSASVGDRVTITCRASQWIGPYLNWYQQKPGKAPKLLIYMGSYLQSGVPSRFRGSGSGTDFTLTISSLQPEDFATYYCQQDLYPPYTFGQGTKVEIKR

SEQ ID NO: 1522 - protein, 108 aa, Homo sapiens
DIQMTQSPSSLSASVGDRVTITCRASQWIGPYLNWYQQKPGKAPKLLIYMGSYLHSGVPSRFSGSGSGTDFTLTISSLQPEDFATYYCQQDLYPPYTFGQGTKVEIKR

SEQ ID NO: 1523 - protein, 108 aa, Homo sapiens
DIQMTQSPSSLSASVGDRVTIICRASEWIGPYLNWYQQKPGKAPKLLIYMGSYLQSGVPSRFSGSGSGTDFTLTISSQQPEDFATYYCQQDLYPPYTFGQGTKVEIKR

SEQ ID NO: 1524 - protein, 108 aa, Homo sapiens
  VARIANT 23: Xaa = Any Amino Acid
DIQMTQSQSSLSAYVGDRVTITXRASQWIGPYLNWYQQKQGKAPKLLIYMGSYLQSGVPSRFSGSGSGTDFTLTISSLQPEDFATYYCQQDLYPPYTFGQGTKVEIKR

SEQ ID NO: 1525 - protein, 108 aa, Homo sapiens
DIQMTQSPSSLSAYVGDRVTITCRASQWIGPYLNWYQQKPGKAPKLLIYMGSYLQSGVPSRFSGSGSGTDFTLTISSLQPEDFATYYCQQDLYPPYTFGQGTNVEIKR

SEQ ID NO: 1526 - protein, 108 aa, Homo sapiens
  VARIANT 23: Xaa = Any Amino Acid
DIQMTQSPSSPSASVGDRVTITXRASQWIGPYLNWYQQKAGKAPKLLIYMGSYLQSGVPSRFSGSGSGTDFTLTISSLQPEDFATYYCQQDLYPPYTFGQGTKVEIKR

SEQ ID NO: 1527 - protein, 108 aa, Homo sapiens
DIQMTQSPSSLSASVGDRVTITCRASQWIGPYLNWYQQKPGKAPKLLIYMGSYLQSGVPSRFSGSGSGTDFTLTISSLQPEDFATYYCQQDLYPPYTFGQGTKLEIKR

SEQ ID NO: 1528 - protein, 108 aa, Homo sapiens
DIQMTQSPSSLSASVGDRVTITCRASQWSGPYLNWYQQKPGKAPKLLIYMGSYLQSGVPSRFSGSGSGTDFTLTISSLQPEDFATYYCQQDLYPPYTFGQGTKVEIKR

SEQ ID NO: 1529 - protein, 108 aa, Homo sapiens
DIQMTQSPSSLSASVGDRVTITCQASQWIGPYLNWYQQKPGKAPKLLIYMGSYLQSGVPSRFSGSGSGTDFTLTISSLQPEDFATYYCQQDLYPPYTFGQGTKVEIKR

SEQ ID NO: 1530 - protein, 108 aa, Homo sapiens
DIQMTQSPSSLSASVGDRVTITCRASQWIGPYLNWYQQKPGRAPKLLIYMGSYLQSGVPSRFSGSGSGTDFTLTISSLQPEDFATYYCQQDLYPPYTFGQGTKVEIKR

SEQ ID NO: 1531 - protein, 108 aa, Homo sapiens
DIQMTQSPSSLSASVGDRVTIICRASQWIGPYLNWYQQKPGKAPKLLIYMGAYLQSGVPSRFSGSGSGTDFTLTISSLQPEDFATYYCQQDLYPPYTFGQGTKVEIKR

SEQ ID NO: 1532 - protein, 108 aa, Homo sapiens
  VARIANT 23: Xaa = Any Amino Acid
DIQMTQSPSSLSASVGDRVTITXRASQWIGPYLNWYQQKPGKAPMLLIYMGSYLQSGVPSRFSGSGSGTDFTLTISSLQPEDFATYYCQQDLYPPYTFGQGTKVEIKR

SEQ ID NO: 1533 - protein, 108 aa, Homo sapiens
  VARIANT 23: Xaa = Any Amino Acid
DIQMTQSPSSLSASVGDRVIITXRASQWIGPYLNWYQQKPGKAPKLLIYMGSYLQSEVPSRFSGSGSGTDFTLTISSLQPEDFATYYCQQDLYPPYTFGQGTKVEIKR

SEQ ID NO: 1534 - protein, 108 aa, Homo sapiens
DIQMTQSPSSLSASVGDRATITCRASQWIGPYLNWYQQKPWKAPKLLIYMGSYLQSGVPSRFSGSGSGTDFTLTISSLQPEDFATYYCQQDLYPPYTFGQGTKVEIKR

SEQ ID NO: 1535 - protein, 108 aa, Homo sapiens
  VARIANT 36: Xaa = Any Amino Acid
DIQMTQSPSSLSASVGDRVTITCRASQWIGPYLNWXQQKPGKAPKPLIYMGRWAPSGVPSRFSGSGSGTDFTLTISSLQPEDFATYYCQQDLYPPFTFGQGTKVEIKR

SEQ ID NO: 1536 - protein, 108 aa, Homo sapiens
  VARIANT 36: Xaa = Any Amino Acid
DIQMTQSPSSLSASVGDRVTITCRASQWIGPYLNWXQQKPGKAPKPLIYMGYHAPSGVPSRFSGSGSGTDFTLTISSLQPEDFATYYCQQDLYPPFTFGQGTKVEIKR

SEQ ID NO: 1537 - protein, 108 aa, Homo sapiens
  VARIANT 36: Xaa = Any Amino Acid
DIQMTQSPSSLSASVGDRVTITCRASQWIGPYLNWXQQKPGKAPKPLIYMGYWASSGVPSRFSGSGSGTDFTLTISSLQPEDFATYYCQQDLYPPFTFGQGTKVEIKR

SEQ ID NO: 1538 - protein, 108 aa, Homo sapiens
  VARIANT 36: Xaa = Any Amino Acid
DIQMTQSPSSLSASVGDRVTITCRASQWIGPYLNWXQQKPGKAPKPLIYMGYWAISGVPSRFSGSGSGTDFTLTISSLQPEDFATYYCQQDLYPPFTFGQGTKVEIKR

SEQ ID NO: 1539 - protein, 108 aa, Homo sapiens
DIQMTQSPSSLSASVGDRVTITCRASQWIGPYLNWFQQKPGKAPKPLIYMGYWAPSGVPSRFSGSGSGTDFTLTISSLQPEDFATYYCQQDLYPPFTFGQGTEVEIKR

SEQ ID NO: 1540 - protein, 108 aa, Homo sapiens
DIQMTQSPSSLSASVGDRVTITCRASQWIGPYLNWYQQKPGKAPKPLIYMGFWAPSGVPSRFSGSGSGTDFTLTISSLQPEDFATYYCQQDLYPPFTFGQGTKVEIKR

SEQ ID NO: 1541 - protein, 108 aa, Homo sapiens
DIQMTQSPSSLSASVGDRVTITCRASQWIGPYLNWYQQKPGKAPKPLIYMGFCAPSGVPSRFSGSGSGTDFTLTISSLQPEDFATYYCQQDLYPPFTFGQGTKVEIKR

SEQ ID NO: 1542 - protein, 108 aa, Homo sapiens
DIQMTQSPSSLSASVGDRVTITCRAGQWIGPYLNWYQQKPGKAPKPLIYMGYWAPSGVPSRFSGSGSGTDFTLTISSLQPEDFATYYCQQDLYPPFTFGQGTKVEIKR

SEQ ID NO: 1543 - protein, 108 aa, Homo sapiens
  VARIANT 38: Xaa = Any Amino Acid
DIQMTQSPSSLSASVGDRVTITCRASQWIGPYLNWYQXKPGKAPKPLIYMGYWAPSGVPSRFSGSGSGTDFTLTISSLQPEDFATYYCQQDLYPPFTFGQGTKVEIGR

SEQ ID NO: 1544 - protein, 108 aa, Homo sapiens
DIQMTQSPSSLSASVGDRVTITCRASQWIGPYLNWYKQKPGKAPKPLIYMGYWAGSGVPSRFSGSGSGTDFTLTISSLQPEDFATYYCQQDLYPPFTFGQGTKVEIRR

SEQ ID NO: 1545 - protein, 108 aa, Homo sapiens
DIQMTQSPSSLSASVGDRVTITCRASQWIGAYLNWYQQKPGKAPKPLIYMGYWAPSGVPSRFSGSRSGTDFTLTISSLQPEDFATYYCQQDLYPPFTFGQGTKVEIKR

SEQ ID NO: 1546 - protein, 108 aa, Homo sapiens
DIQMTQSPSSLSASVGDRVTITCRASQWIGPYLNWYQQKPGKAPKPLIYMGYWAPSGVPSRFSGSGSGTDFTLTISSLQPEDFATYYCQQDGYPPFTFGQGTKVEIKR

SEQ ID NO: 1547 - protein, 108 aa, Homo sapiens
DIQMTQSPSSLSASVGDRVTITCRASQWIGPYLNWYQQKPGKAPKPLIYMGYWAPSGVPSRFSGSGSGTDFTLTISSLQPEDFATYYCQQDVYPPFTFGQGTKVEIKR

SEQ ID NO: 1548 - protein, 108 aa, Homo sapiens
DIQMTQSPSSLSASVGDRVTITCRASQWIGPYLNWYQQKPGKAPKPLIYMGYWAPSGVPSRFSGSGSGTDFTLTISSLQPEDFATYYCQQDFYPPFTFGQGTKVEIKR

SEQ ID NO: 1549 - protein, 108 aa, Homo sapiens
DIQMTQSPSSLSASVGDRVTITCRASQWIGPYLNWYQQKPGKAPKPLIYMGYWAPSGVPSRFSGSGSGTDFTLTISSLQPEDFATYYCQQDLLPPFTFGQGTKVEIKR

SEQ ID NO: 1550 - protein, 108 aa, Homo sapiens
DIQMTQSPSSLSASVGDRVTITCRASQWIGPYLNWYQQKPGKAPKPLIYMGYWAPSGVPSRFSGSGSGTDFTLTISSLQPEDSATYYCQQDIYPPFTFGQGTKVEIKR

SEQ ID NO: 1551 - protein, 108 aa, Homo sapiens
DIQMTQSPSSLSASVGDRVTITCRASQWIGPYLNWYQQKPGKAPKPLIYMGYWAPSGVPSRFSGSGSGTDFTLTISSLQPEDFATYYCQQDWYPPFTFGQGTKVEIKR

SEQ ID NO: 1552 - protein, 108 aa, Homo sapiens
DIQMTQSPSSLSASVGDRVTITCRASQWIGPYLNWYQQKPGKAPKLLIYMGSYLQSGVPSRFSGSGSRTDFTLTISSLQPEDFATYYCQQDLYPPYTFGQGTQVEIKR

SEQ ID NO: 1553 - protein, 108 aa, Homo sapiens
DIQMTQSPSSLSASVGDRVTITCRASQWIGPYLNWYQQKPGKAPKLLIYMGSYLQSGVPSRFSGSGSGTDFTLTISNLQPEDFVTYYCQQDLYPPYTFGQGTKVEIKR

SEQ ID NO: 1554 - protein, 108 aa, Homo sapiens; identical to SEQ ID NO: 577

SEQ ID NO: 1555 - protein, 108 aa, Homo sapiens
DIQMTQSPSILSASVGDRVTITCLASQWIGPYLNWYQQKPGKAPKLLIYMGSYLQSGVPSRFSGSGSGTDFTFTISSLQPEDFATYYCQQDLYPPYTFGQGTKVEIKR

SEQ ID NO: 1556 - protein, 108 aa, Homo sapiens
DIQVTQSPSALSASVGDRVTITCRASQWIGPYLNWYQQKPGKAPKPLIYMGSYLPSGVPSRFSGSGSGTDFTLTISSLQPEDFATYYCQQDLYPPYTFGQGTKVEIKR

SEQ ID NO: 1557 - protein, 108 aa, Homo sapiens
DIQMTQSPSSLSASVGDRVTITCRASQWIGPYLNWYQQKPGKAPKPLIYMGSYLPSGVPSRFSGSGSGTDFTLTISSLQPEDFATYYCQQDLYPPYTFGQGTKVEIKR

SEQ ID NO: 1558 - protein, 108 aa, Homo sapiens; identical to SEQ ID NO: 1557

SEQ ID NO: 1559 - protein, 108 aa, Homo sapiens
DIQMTQSPSSLSASVGDRVTITCRASQWIGPYLNWYQQKPGKAPKPLIYMGSYLPSGVPSRFSGSGSGTDFTLTINSLQPEDFATYYCQQDLYPPFTFGQGTKVEIKR

SEQ ID NO: 1560 - protein, 108 aa, Homo sapiens
DIQMTQSPSSLSASVGDRVTITCRAGQWIGPYLNWYQQKSGKAPKPLIYMGSYLPSGVPSRFSGSGSGTDFTLTINSLQPEDFATYYCQQDLYPPFTFGQGTKVGIKR

SEQ ID NO: 1561 - protein, 108 aa, Homo sapiens
DIQMTQSPSSLSASVGDRVTITCQASQWIGPYLNWYQQKPGEAPKPLIYMGSYLPSGVPSRFSGSGSGTDFTLTISSLQPEDFATYYCQQDLYPPFTFGQGTKVEIKR

SEQ ID NO: 1562 - protein, 108 aa, Homo sapiens
DIQMTQSPSSLSASVGDRVTITCRASQWIGPYLNWYQQKPGEAPKPLIYMGSYLPSGVPSRFSGSGSGTDFTLTISSLQPEDFATYYCQQDLYPPFTFGQGTKVEIKR

SEQ ID NO: 1563 - protein, 108 aa, Homo sapiens
DIQMTQSPSSLSASVGDRVTITCRASQWIGPYLNWYQQKPGKAPKPLIYMGSYLPSGVPSRFSGSGSGTDFTLTISSLQPEDFATYYCQQDLYPPFTFGQGTKVEIKR

SEQ ID NO: 1564 - protein, 108 aa, Homo sapiens; identical to SEQ ID NO: 1557

SEQ ID NO: 1565 - protein, 108 aa, Homo sapiens
DIQMTQSPSSLSASVGDRVTITCRAGQWIGPYLNWYQQKSGKAPKPLIYMGSYLPSGVPSRFSGSGSGTDFTLTINSLQPEDFATYYCQQDLYPPFTFGQGTKVEIKW

SEQ ID NO: 1566 - protein, 108 aa, Homo sapiens; identical to SEQ ID NO: 1557

SEQ ID NO: 1567 - protein, 108 aa, Homo sapiens
DIQMTQSPSSLSASVGDRVTITCRASQWIGPYLNWYQQKPGKAPKLLIYMGSYLQSGVPSRFSGSGSGTDFTLTISSLQPEDFATYYCQQDLYPPYAFGQGTKVEIKR

SEQ ID NO: 1568 - protein, 108 aa, Homo sapiens
DIQMTQSPSSLSASVGDRVTITCRASQWIGPYLNWYQQRPGRAPKLLIYMGSYLQSGVPSRFSGSRSGKDFTLTISSPQPEDFATYYCQQDLYPPYTFGQGTKVEIKR

SEQ ID NO: 1569 - protein, 108 aa, Homo sapiens
DIQMTQSPSSLSASVGDRVTITCRASQWIGPYLNWYQQKPGKAPKLLIYMGSYLQSGVPSRFSGSGSRTDFTLTISSLQPEDYATYYCQQDLYPPYTFGQGTKVEIKR

SEQ ID NO: 1570 - protein, 108 aa, Homo sapiens
DIQMTQSPSSPSASVGDRVTITCRASQWIGPYLNWYQQRPGKAPKLLIYMGSYLQSGVPSRFSGSGSGTDFTLTISSLQPEDFATYYCQQDLYPPFTFGQGTKVEIKR

SEQ ID NO: 1571 - protein, 108 aa, Homo sapiens; identical to SEQ ID NO: 1513

SEQ ID NO: 1572 - protein, 107 aa, Homo sapiens
DIQMTQSPSSLSASVGNRVTITCRASQWIGPYLNWYQQKPGEAPKPLIYMGSYLPSGVPSRFSGSGSGTDFALTISSLQPEDVATYYCQQDLYPPTFGQGTKVEIKR

SEQ ID NO: 1573 - protein, 108 aa, Homo sapiens
DIQMTQSPSSPSASVGDRVTITCRASQWIGPYLNWYQQKPGKAPKLLIYMGSYLQSGVPSRFSGSGSGTDFTLTISSLQPEDFATYYCQQDLYPPYTFGQGTKVEIKR

SEQ ID NO: 1574 - protein, 108 aa, Homo sapiens
DIQMTQSPSSLSASVGDRVTITCRASQWIGPYLNWYQQKPGKAPKLLIYMGSYLQSGVPSRFSGSGSGTDFTLTISSLQPEDFAMYYCQQDLYPPYTFGQGTKVEIKR

SEQ ID NO: 1575 - protein, 107 aa, Homo sapiens
DIQMTQSPSSLSASVGDRVTITCRATQWIGPYLNWYQQKPGKAPKLLIYMGSYLQSGVPSRFSGSGSGTDFTLTISSLQPEDFATYYCQQDLYPPTFGQGTKVEIKR

SEQ ID NO: 1576 - protein, 108 aa, Homo sapiens; identical to SEQ ID NO: 1560

SEQ ID NO: 1577 - protein, 108 aa, Homo sapiens; identical to SEQ ID NO: 1563

SEQ ID NO: 1578 - protein, 108 aa, Homo sapiens
DIQMTQSPSSLSASVGDRVTITCRASQWIGPYLNWYQQKPGKAPKLLIYMGSYLQSGVPSRFSGSRSGTDFTLTISSLQPEDFATYYCQQDLYPPYTFGQGTKVEIKR

SEQ ID NO: 1579 - protein, 108 aa, Homo sapiens; identical to SEQ ID NO: 1512

SEQ ID NO: 1580 - protein, 108 aa, Homo sapiens; identical to SEQ ID NO: 1562

SEQ ID NO: 1581 - protein, 108 aa, Homo sapiens; identical to SEQ ID NO: 1557

SEQ ID NO: 1582 - protein, 108 aa, Homo sapiens; identical to SEQ ID NO: 1559

SEQ ID NO: 1583 - protein, 108 aa, Homo sapiens
DIQMTQSPSSLSASAGVRVAITCRASQWIGPYLNWYQQKPGKAPKLLIYMGSYLRSGVPSRFSGSGSGTDFTLTISSLQPEDFATYYCQQDLYPPYTFGQGTKVEIKR

SEQ ID NO: 1584 - protein, 108 aa, Homo sapiens
DIQMTQSPSSLSASVGDRVTVTCRASQWIGPYLNWYQQKPGKAPKLLIYMGSYLHSGVPSRFSGSGSGTDFTLTISSLQPEDFATYYCQQDLYPPYTFGQGTKVEIKR

SEQ ID NO: 1585 - protein, 108 aa, Homo sapiens; identical to SEQ ID NO: 1513

SEQ ID NO: 1586 - protein, 108 aa, Homo sapiens
DIQMTQSPSSLSASVGDRVTITCRASQWIGPYLNWYQQKPGKAPKPLIYMGSWRPSGVPSRFSGSGSGTDFTLTISSLQPEDFATYYCQQDLYPPFTFGQGTKVEIKR

SEQ ID NO: 1587 - protein, 108 aa, Homo sapiens
DIQMTQSPSSLSASVGDRVTITCRASQWIGPYLNWYQQKPGKAPKPLIYMGYWAPSGVPSRFSGSGSGTDFTLTISSLQPEDFATYYCQQDLYPPFTFGQGTKVEIKR

SEQ ID NO: 1588 - protein, 108 aa, Homo sapiens
DIQITQSPSSLSASVGDRVTITCRASQWIGPYLNWYQQKPGKAPKPLIYMGSYLAHGVPSRFSGSGSGTDFTLTISSLQPEDFATYYCQQDLYPPYTFGQGTKVEIKR

SEQ ID NO: 1589 - protein, 108 aa, Homo sapiens
DIQMTQSPSSLSASVGDRVTITCRASQWIGPYLNWYQQKPGKAPKPLIYMGSYHGTGVPSRFSGSGSGTDFTLTISSLQPEDYATYYCQQDLYPPYTFGQGTKVEIKR

SEQ ID NO: 1590 - protein, 108 aa, Homo sapiens
DIQMTQSPSSLSASVGDRVTITCRASQWIGPYLNWYQQKPGKAPKPLIYMGSYRPLGVPSRFSGSGSGTDFTLTISSLQPEDFATYYCQQDLYPPYTFGQGTKVEIKR

SEQ ID NO: 1591 - protein, 108 aa, Homo sapiens
DIQMTQSPSSLSASVGDRVTITCRASQWIGPYLNWYQQKPGKAPKPLIYMGSYRPAGVPSRFSGSGSGTDFTLTISSLQPEDFATYYCQQDLYPPYTFGQGTKVEIKR

SEQ ID NO: 1592 - protein, 108 aa, Homo sapiens
DIQMTQSPSSLSASVGDRVTITCRASQWIGPYLNWYQQKPGKAPKPLIYMGSYRAQGVPSRFSGSGSGTDFTLTISSLQPEDFATYYCQQDLYPPYTFGQGTKVEIKR

SEQ ID NO: 1593 - protein, 108 aa, Homo sapiens
DIQMTQSPSSLSASVGDRVTITCRASQWIGPYLNWYQQKPGKAPKPLIYMGSYFASGVPSRFSGSGSGTNFTLTISSLQPEDFATYYCQQDLYPPYTFGQGTKVEIKR

SEQ ID NO: 1594 - protein, 108 aa, Homo sapiens
DIQMTQSPSSLSASVGDRVTITCRASQWIGPYLNWYQQKPGKAPKLLIYMGSYWWSGVPSRFSGSGSGTDFTLTISSLQPEDFATYYCQQDLYPPYTFGQGTKVEIKR

SEQ ID NO: 1595 - protein, 108 aa, Homo sapiens
DIQMTQSPSSLSASVGDRVTITCRASQWIGPYLNWYQQKPGKAPKLLIYMGSYLQSGVPSRFSGSGSGTDFTLTISSLQPEDFATYYCQQDLYMPAEFGQGTKVEIKR

SEQ ID NO: 1596 - protein, 108 aa, Homo sapiens
DIQMTQSPSSLSASVGDRVTITCRASQWIGPYLNWYQQKPGKAPKLLIYMGSYLQSGVPSRFSGSGSGTDFTLTISSLQPEDFATYYCQQDLYEPLNFGQGTKVEIKR

SEQ ID NO: 1597 - protein, 108 aa, Homo sapiens
DIQMTQSPSSLSASVGDRVTITCRASQWIGPYLNWYQQKPGKAPKLLTYMGSYLQSGVPSRFSGSGSGTDFTLTISSLQPEDFATYYCQQDLYMPSEFGQGTKVEIKR

SEQ ID NO: 1598 - protein, 108 aa, Homo sapiens
DIQMTQSPSSLSASVGDRVTITCRASQWIGPYLNWYQQKPGKAPKLLIYMGSYLQSGVPSRFSGSGSGTDFTLTISSLQPEDFATYYCQQDLYMPVEFGQGTKVEIKR

SEQ ID NO: 1599 - protein, 108 aa, Homo sapiens
DIQMTQSPSSLSASVGDRVTITCRASQWIGPYLNWYQQKPGKAPKLLIYMGSYLQSGVPSRFSGSGSGTDFTLTISSLQPEDFATYYCQQDLYGPGEFGQGTKVEIKR

SEQ ID NO: 1600 - protein, 108 aa, Homo sapiens
DIQMTQSPSSLSASVGDRVTITCRASQWIGPYLNWYQQKPGKAPKLLIYMGSYLQSGVPSRFSGSGSGTDFTLTISSLQPEDFATYYCQQDLYLPFTFGQGTKVEIKR

SEQ ID NO: 1601 - protein, 108 aa, Homo sapiens
DIQITQSPSSLSASVGDRVTITCRASQWIGPYLNWYQQKPGKAPKLLIYMGSYLQSGVPSRFSGSGSGTDFTLTISSLQPEDFATYYCQQDLYAPWKFGQGTKVEIKR

SEQ ID NO: 1602 - protein, 108 aa, Homo sapiens
DIQMTQSPSSLSASVGDRVTITCRADQWIGPYLNWYQQKPGKAPKLLIYMGSYLQSGVPSRFSGSGSGTDFTLTISSLQPEDFATYYCQQDLYPPYTFGQGTKVEIKR

SEQ ID NO: 1603 - protein, 108 aa, Homo sapiens
DIQMTQSPSSLSASVGDRVTITCRATQWIGPYLNWYQQKPGKAPKLLIYMGSYLQSGVPSRFSGSGSGTDFTLTISSLQPEDFATYYCQQDLYPPYTFGQGTKVEIKR

SEQ ID NO: 1604 - protein, 108 aa, Homo sapiens
DIQMTQSPSSLSASVGDRVTITCRANQWIGPYLNWYQQKPGKAPKLLIYMGSYLQSGVPSRFSGSGSGTDFTLTISSLQPEDFATYYCQQDLYPPYTFGQGTKVEIKR

SEQ ID NO: 1605 - protein, 108 aa, Homo sapiens
DIQMTQSPSSLSASVGDRVTITCRASQWIGPYLNWYQQKPGKAPKLLIYMGSYLASGVPSRFSGSGSGTDFTLTISSLQPEDFATYYCQQDLYPPYTFGQGTEVEIKR

SEQ ID NO: 1606 - protein, 108 aa, Homo sapiens
DIQMTQSPSSLSASVGDRVTITCRASQWIGPYLNWYQQKPGKAPKLLIYMGSYLWSGVPSRFSGSGSGTDFTLTISSLQPEDFATYYCQQDLYPPYTFGQGTKVEIKR

SEQ ID NO: 1607 - protein, 108 aa, Homo sapiens; identical to SEQ ID NO: 1515

SEQ ID NO: 1608 - protein, 108 aa, Homo sapiens; identical to SEQ ID NO: 1512

SEQ ID NO: 1609 - protein, 108 aa, Homo sapiens; identical to SEQ ID NO: 1516

SEQ ID NO: 1610 - protein, 108 aa, Homo sapiens
DIQMTQSPSSLSASVGDRVTITCRASQWIGPYLNWYQQKPGKAPKPLIYMGYWAPSGVPSRFSGSGSGTDFTLTISSLQPEDFATYYCQQDLYMPAEFGQGTKVEIKR

SEQ ID NO: 1611 - protein, 108 aa, Homo sapiens
DIQMTQSPSSLSASVGDRVTITCRASQWIGPYLNWYQQKPGKAPKPLIYMGYWAPSGVPSRFSGSGSGTDFTLTISSLQPEDFATYYCQQDLYEPLNFGQGTKVEIKR

SEQ ID NO: 1612 - protein, 108 aa, Homo sapiens
DIQMTQSPSSLSASVGDRVTITCRASQWIGPYLNWYQQKPGKAPKPLIYMGYWAPSGVPSRFSGSGSGTDFTLTISSLQPEDFATYYCQQDLYMPSEFGQGTKVEIKR

SEQ ID NO: 1613 - protein, 108 aa, Homo sapiens
DIQMTQSPSSLSASVGDRVTITCRASQWIGPYLNWYQQKPGKAPKPLIYMGYWAPSGVPSRFSGSGSGTDFTLTISSLQPEDFATYYCQQDLYMPVEFGQGTKVEIKR

SEQ ID NO: 1614 - protein, 108 aa, Homo sapiens
DIQMTQSPSSLSASVGDRVTITCRASQWIGPYLNWYQQKPGKAPKPLIYMGYWAPSGVPSRFSGSGSGTDFTLTISSLQPEDFATYYCQQDLYGPGEFGQGTKVEIKR

SEQ ID NO: 1615 - protein, 108 aa, Homo sapiens
DIQMTQSPSSLSASVGDRVTITCRASQWIGPYLNWYQQKPGKAPKPLIYMGYWAPSGVPSRFSGSGSGTDFTLTISSLQPEDFATYYCQQDLYLPFMFGQGTKVEIKR

SEQ ID NO: 1616 - protein, 108 aa, Homo sapiens
DIQMTQSPSSLSASVGDRVTITCRASQWIGPYLNWYQQKPGKAPKPLIYMGYWAPSGVPSRFSGSGSGTDFTLTISSLQPEDFATYYCQQDLYAPWKFGQGTKVEIKR

SEQ ID NO: 1617 - protein, 108 aa, Homo sapiens
DIQITQSPSSLSASVGDRVTITCRASQWIGPYLNWYQQKPGKAPKPLIYMGSYLAHGVPSRFSGSGSGTDFTLTISSLQPEDFATYYCQQDLYMPAEFGQGTKVEIKR

SEQ ID NO: 1618 - protein, 108 aa, Homo sapiens
DIQITQSPSSLSASVGDRVTITCRASQWIGPYLNWYQQKPGKAPKPLIYMGSYLAHGVPSRFSGSGSGTDFTLTISSLQPEDFATYYCQQDLYEPLNFGQGTKVEIKR

SEQ ID NO: 1619 - protein, 108 aa, Homo sapiens
DIQITQSPSSLSASVGDRVTITCRASQWIGPYLNWYQQKPGKAPKPLIYMGSYLAHGVPSRFSGSGSGTDFTLTISSLQPEDFATYYCQQDLYMPSEFGQGTKVEIKR

SEQ ID NO: 1620 - protein, 108 aa, Homo sapiens
DIQITQSPSSLSASVGDRVTITCRASQWIGPYLNWYQQKPGKAPKPLIYMGSYLAHGVPSRFSGSGSGTDFTLTISSLQPEDFATYYCQQDLYMPVEFGQGTKVEIKR

SEQ ID NO: 1621 - protein, 108 aa, Homo sapiens
DIQITQSPSSLSASVGDRVTITCRASQWIGPYLNWYQQKPGKAPKPLIYMGSYLAHGVPSRFSGSGSGTDFTLTISSLQPEDFATYYCQQDLYGPGEFGQGTKVEIKR

SEQ ID NO: 1622 - protein, 108 aa, Homo sapiens
DIQITQSPSSLSASVGDRVTITCRASQWIGPYLNWYQQKPGKAPKPLIYMGSYLAHGVPSRFSGSGSGTDFTLTISSLQPEDFATYYCQQDLYLPFMFGQGTKVEIKR

SEQ ID NO: 1623 - protein, 108 aa, Homo sapiens
DIQITQSPSSLSASVGDRVTITCRASQWIGPYLNWYQQKPGKAPKPLIYMGSYLAHGVPSRFSGSGSGTDFTLTISSLQPEDFATYYCQQDLYAPWKFGQGTKVEIKR

SEQ ID NO: 1624 - protein, 108 aa, Homo sapiens
DIQMTQSPSSLSASVGDRVTITCRASQWIGPYLNWYQQKPGKAPKPLIYMGSYHGTGVPSRFSGSGSGTDFTLTISSLQPEDYATYYCQQDLYMPAEFGQGTKVEIKR

SEQ ID NO: 1625 - protein, 108 aa, Homo sapiens
DIQMTQSPSSLSASVGDRVTITCRASQWIGPYLNWYQQKPGKAPKPLIYMGSYHGTGVPSRFSGSGSGTDFTLTISSLQPEDYATYYCQQDLYEPLNFGQGTKVEIKR

SEQ ID NO: 1626 - protein, 108 aa, Homo sapiens
DIQMTQSPSSLSASVGDRVTITCRASQWIGPYLNWYQQKPGKAPKPLIYMGSYHGTGVPSRFSGSGSGTDFTLTISSLQPEDYATYYCQQDLYMPSEFGQGTKVEIKR

SEQ ID NO: 1627 - protein, 108 aa, Homo sapiens
DIQMTQSPSSLSASVGDRVTITCRASQWIGPYLNWYQQKPGKAPKPLIYMGSYHGTGVPSRFSGSGSGTDFTLTISSLQPEDYATYYCQQDLYMPVEFGQGTKVEIKR

SEQ ID NO: 1628 - protein, 108 aa, Homo sapiens
DIQMTQSPSSLSASVGDRVTITCRASQWIGPYLNWYQQKPGKAPKPLIYMGSYHGTGVPSRFSGSGSGTDFTLTISSLQPEDYATYYCQQDLYGPGEFGQGTKVEIKR

SEQ ID NO: 1629 - protein, 108 aa, Homo sapiens
DIQMTQSPSSLSASVGDRVTITCRASQWIGPYLNWYQQKPGKAPKPLIYMGSYHGTGVPSRFSGSGSGTDFTLTISSLQPEDYATYYCQQDLYLPFMFGQGTKVEIKR

SEQ ID NO: 1630 - protein, 108 aa, Homo sapiens
DIQMTQSPSSLSASVGDRVTITCRASQWIGPYLNWYQQKPGKAPKPLIYMGSYHGTGVPSRFSGSGSGTDFTLTISSLQPEDYATYYCQQDLYAPWKFGQGTKVEIKR

SEQ ID NO: 1631 - protein, 108 aa, Homo sapiens
DIQMTQSPSSLSASVGDRVTITCRASQWIGPYLNWYQQKPGKAPKPLIYMGSYRPLGVPSRFSGSGSGTDFTLTISSLQPEDFATYYCQQDLYMPAEFGQGTKVEIKR

SEQ ID NO: 1632 - protein, 108 aa, Homo sapiens
DIQMTQSPSSLSASVGDRVTITCRASQWIGPYLNWYQQKPGKAPKPLIYMGSYRPLGVPSRFSGSGSGTDFTLTISSLQPEDFATYYCQQDLYEPLNFGQGTKVEIKR

SEQ ID NO: 1633 - protein, 108 aa, Homo sapiens
DIQMTQSPSSLSASVGDRVTITCRASQWIGPYLNWYQQKPGKAPKPLIYMGSYRPLGVPSRFSGSGSGTDFTLTISSLQPEDFATYYCQQDLYMPSEFGQGTKVEIKR

SEQ ID NO: 1634 - protein, 108 aa, Homo sapiens
DIQMTQSPSSLSASVGDRVTITCRASQWIGPYLNWYQQKPGKAPKPLIYMGSYRPLGVPSRFSGSGSGTDFTLTISSLQPEDFATYYCQQDLYMPVEFGQGTKVEIKR

SEQ ID NO: 1635 - protein, 108 aa, Homo sapiens
DIQMTQSPSSLSASVGDRVTITCRASQWIGPYLNWYQQKPGKAPKPLIYMGSYRPLGVPSRFSGSGSGTDFTLTISSLQPEDFATYYCQQDLYGPGEFGQGTKVEIKR

SEQ ID NO: 1636 - protein, 108 aa, Homo sapiens
DIQMTQSPSSLSASVGDRVTITCRASQWIGPYLNWYQQKPGKAPKPLIYMGSYRPLGVPSRFSGSGSGTDFTLTISSLQPEDFATYYCQQDLYLPFMFGQGTKVEIKR

SEQ ID NO: 1637 - protein, 108 aa, Homo sapiens
DIQMTQSPSSLSASVGDRVTITCRASQWIGPYLNWYQQKPGKAPKPLIYMGSYRPLGVPSRFSGSGSGTDFTLTISSLQPEDFATYYCQQDLYAPWKFGQGTKVEIKR

SEQ ID NO: 1638 - protein, 108 aa, Homo sapiens
DIQMTQSPSSLSASVGDRVTITCRASQWIGPYLNWYQQKPGKAPKPLIYMGSYRAQGVPSRFSGSGSGTDFTLTISSLQPEDFATYYCQQDLYMPAEFGQGTKVEIKR

SEQ ID NO: 1639 - protein, 108 aa, Homo sapiens
DIQMTQSPSSLSASVGDRVTITCRASQWIGPYLNWYQQKPGKAPKPLIYMGSYRAQGVPSRFSGSGSGTDFTLTISSLQPEDFATYYCQQDLYEPLNFGQGTKVEIKR

SEQ ID NO: 1640 - protein, 108 aa, Homo sapiens
DIQMTQSPSSLSASVGDRVTITCRASQWIGPYLNWYQQKPGKAPKPLIYMGSYRAQGVPSRFSGSGSGTDFTLTISSLQPEDFATYYCQQDLYMPSEFGQGTKVEIKR

SEQ ID NO: 1641 - protein, 108 aa, Homo sapiens
DIQMTQSPSSLSASVGDRVTITCRASQWIGPYLNWYQQKPGKAPKPLIYMGSYRAQGVPSRFSGSGSGTDFTLTISSLQPEDFATYYCQQDLYMPVEFGQGTKVEIKR

SEQ ID NO: 1642 - protein, 108 aa, Homo sapiens
DIQMTQSPSSLSASVGDRVTITCRASQWIGPYLNWYQQKPGKAPKPLIYMGSYRAQGVPSRFSGSGSGTDFTLTISSLQPEDFATYYCQQDLYGPGEFGQGTKVEIKR

SEQ ID NO: 1643 - protein, 108 aa, Homo sapiens
DIQMTQSPSSLSASVGDRVTITCRASQWIGPYLNWYQQKPGKAPKPLIYMGSYRAQGVPSRFSGSGSGTDFTLTISSLQPEDFATYYCQQDLYLPFMFGQGTKVEIKR

SEQ ID NO: 1644 - protein, 108 aa, Homo sapiens
DIQMTQSPSSLSASVGDRVTITCRASQWIGPYLNWYQQKPGKAPKPLIYMGSYRAQGVPSRFSGSGSGTDFTLTISSLQPEDFATYYCQQDLYAPWKFGQGTKVEIKR

SEQ ID NO: 1645 - protein, 108 aa, Homo sapiens
DIQMTQSPSSLSASVGDRVTITCRASQWIGPYLNWYQQKPGKAPKPLIYMGSYFASGVPSRFSGSGSGTNFTLTISSLQPEDFATYYCQQDLYMPAEFGQGTKVEIKR

SEQ ID NO: 1646 - protein, 108 aa, Homo sapiens
DIQMTQSPSSLSASVGDRVTITCRASQWIGPYLNWYQQKPGKAPKPLIYMGSYFASGVPSRFSGSGSGTNFTLTISSLQPEDFATYYCQQDLYEPLNFGQGTKVEIKR

SEQ ID NO: 1647 - protein, 108 aa, Homo sapiens
DIQMTQSPSSLSASVGDRVTITCRASQWIGPYLNWYQQKPGKAPKPLIYMGSYFASGVPSRFSGSGSGTNFTLTISSLQPEDFATYYCQQDLYMPSEFGQGTKVEIKR

SEQ ID NO: 1648 - protein, 108 aa, Homo sapiens
DIQMTQSPSSLSASVGDRVTITCRASQWIGPYLNWYQQKPGKAPKPLIYMGSYFASGVPSRFSGSGSGTNFTLTISSLQPEDFATYYCQQDLYMPVEFGQGTKVEIKR

SEQ ID NO: 1649 - protein, 108 aa, Homo sapiens
DIQMTQSPSSLSASVGDRVTITCRASQWIGPYLNWYQQKPGKAPKPLIYMGSYFASGVPSRFSGSGSGTNFTLTISSLQPEDFATYYCQQDLYGPGEFGQGTKVEIKR

SEQ ID NO: 1650 - protein, 108 aa, Homo sapiens
DIQMTQSPSSLSASVGDRVTITCRASQWIGPYLNWYQQKPGKAPKPLIYMGSYFASGVPSRFSGSGSGTNFTLTISSLQPEDFATYYCQQDLYLPFMFGQGTKVEIKR

SEQ ID NO: 1651 - protein, 108 aa, Homo sapiens
DIQMTQSPSSLSASVGDRVTITCRASQWIGPYLNWYQQKPGKAPKPLIYMGSYFASGVPSRFSGSGSGTNFTLTISSLQPEDFATYYCQQDLYAPWKFGQGTKVEIKR

SEQ ID NO: 1652 - protein, 108 aa, Homo sapiens
DIQMTQSPSSLSASVGDRVTITCRASQWIGPYLNWYQQKPGKAPKLLIYMGSYWWSGVPSRFSGSGSGTDFTLTISSLQPEDFATYYCQQDLYMPAEFGQGTKVEIKR

SEQ ID NO: 1653 - protein, 108 aa, Homo sapiens
DIQMTQSPSSLSASVGDRVTITCRASQWIGPYLNWYQQKPGKAPKLLIYMGSYWWSGVPSRFSGSGSGTDFTLTISSLQPEDFATYYCQQDLYEPLNFGQGTKVEIKR

SEQ ID NO: 1654 - protein, 108 aa, Homo sapiens
DIQMTQSPSSLSASVGDRVTITCRASQWIGPYLNWYQQKPGKAPKLLIYMGSYWWSGVPSRFSGSGSGTDFTLTISSLQPEDFATYYCQQDLYMPSEFGQGTKVEIKR

SEQ ID NO: 1655 - protein, 108 aa, Homo sapiens
DIQMTQSPSSLSASVGDRVTITCRASQWIGPYLNWYQQKPGKAPKLLIYMGSYWWSGVPSRFSGSGSGTDFTLTISSLQPEDFATYYCQQDLYMPVEFGQGTKVEIKR

SEQ ID NO: 1656 - protein, 108 aa, Homo sapiens
DIQMTQSPSSLSASVGDRVTITCRASQWIGPYLNWYQQKPGKAPKLLIYMGSYWWSGVPSRFSGSGSGTDFTLTISSLQPEDFATYYCQQDLYGPGEFGQGTKVEIKR

SEQ ID NO: 1657 - protein, 108 aa, Homo sapiens
DIQMTQSPSSLSASVGDRVTITCRASQWIGPYLNWYQQKPGKAPKLLIYMGSYWWSGVPSRFSGSGSGTDFTLTISSLQPEDFATYYCQQDLYLPFMFGQGTKVEIKR

SEQ ID NO: 1658 - protein, 108 aa, Homo sapiens
DIQMTQSPSSLSASVGDRVTITCRASQWIGPYLNWYQQKPGKAPKLLIYMGSYWWSGVPSRFSGSGSGTDFTLTISSLQPEDFATYYCQQDLYAPWKFGQGTKVEIKR

SEQ ID NO: 1659 - protein, 107 aa, Homo sapiens
DIQMTQSPSSLSASVGDRVTITCRASQWIGPYLNWYQQKPGKAPKLLIYMGSYLQSGVPSRFSGSGSGTDFTLTISSLQPEDFATYYCQQDLYAPQFGQGTKVEIKR

SEQ ID NO: 1660 - protein, 108 aa, Homo sapiens
DIQMTQSPSSLSASVGDRVTITCRASQWIGPYLNWYQQKPGKAPKLLIYMGSYSGSGVPSRFSGSGSGTDFTLTISSLQPEDFATYYCQQDLYEPLNFGQGTKVEIKR

SEQ ID NO: 1661 - protein, 108 aa, Homo sapiens
DIQMTQSPSSLSASVGDRVTITCRASQWIGPYSNWYQQKPGKAPKLLIYMGSYLQSGVPSRFSGSGSGTDFTLTISSLQPEDFATYYCQQDLYPPYTFGQGTKVEIKR

SEQ ID NO: 1662 - protein, 108 aa, Homo sapiens
DIQMTQSPSSLSASVGDRVTITCRASQWIGPYNNWYQQKPGKAPKLLIYMGSYLQSGVPSRFSGSGSGTDFTLTISSLQPEDFATYYCQQDLYPPYTFGQGTKVEIKR

SEQ ID NO: 1663 - protein, 108 aa, Homo sapiens
DIQMTQSPSSLSASVGDRVTITCRATQWIGPYLNWYQQKPGKAPKPLIYMGSYLPSGVPSRFSGSGSGTDFTLTISSLQPEDFATYYCQQDLYPPFTFGQGTKVEIKR

SEQ ID NO: 1664 - protein, 108 aa, Homo sapiens
DIQMTQSPSSLSASVGDRVTITCRATQWIGPYLNWYQQKPGKAPKPLIYMGYWAPSGVPSRFSGSGSGTDFTLTISSLQPEDFATYYCQQDLYPPFTFGQGTKVEIKR

SEQ ID NO: 1665 - protein, 108 aa, Homo sapiens
DIQMTQSPSSLSASVGDRVTITCRASQWIGPYLNWYQQKPGKAPKPLIYVGYWAPSGVPSRFSGSGSGTDFTLTISSLQPEDFATYYCQQDLYPPFTFGQGTKVEIKR

SEQ ID NO: 1666 - protein, 108 aa, Homo sapiens
DIQMTQSPSSLSASVGDRVTITCRASQWIGPYLNWYQQKPGKAPKPLIYMGSYLPSGVPSRFSGSGSGTDFTLTISSLQPEDFATYYCQQDLYLPFTFGQGTKVEIKR

SEQ ID NO: 1667 - protein, 108 aa, Homo sapiens
DIQMTQSPSSLSASVGDRVTITCRASQWIGPYLNWYQQKPGKAPKPLIYMGYWAPSGVPSRFSGSGSGTDFTLTISSLQPEDFATYYCQQDLYLPFTFGQGTKVEIKR

SEQ ID NO: 1668 - protein, 108 aa, Homo sapiens
DIQMTQSPSSLSASVGDRVTITCRATQWIGPYLNWYQQKPGKAPKPLIYMGSYLPSGVPSRFSGSGSGTDFTLTISSLQPEDFATYYCQQDLYLPFTFGQGTKVEIKR

SEQ ID NO: 1669 - protein, 108 aa, Homo sapiens
DIQMTQSPSSLSASVGDRVTITCRASQWIGPYLNWYQQKPGKAPKPLIYVGSYLPSGVPSRFSGSGSGTDFTLTISSLQPEDFATYYCQQDLYPPFTFGQGTKVEIKR

SEQ ID NO: 1670 - protein, 108 aa, Homo sapiens
DIQMTQSPSSLSASVGDRVTITCRATQWIGPYLNWYQQKPGKAPKPLIYVGSYLPSGVPSRFSGSGSGTDFTLTISSLQPEDFATYYCQQDLYPPFTFGQGTKVEIKR

SEQ ID NO: 1671 - protein, 108 aa, Homo sapiens
DIQMTQSPSSLSASVGDRVTITCRASQWIGPYNNWYQQKPGKAPKPLIYMGSYLPSGVPSRFSGSGSGTDFTLTISSLQPEDFATYYCQQDLYPPFTFGQGTKVEIKR

SEQ ID NO: 1672 - protein, 108 aa, Homo sapiens
DIQMTQSPSSLSASVGDRVTITCRASQWIGPYNNWYQQKPGKAPKPLIYMGYWAPSGVPSRFSGSGSGTDFTLTISSLQPEDFATYYCQQDLYPPFTFGQGTKVEIKR

SEQ ID NO: 1673 - protein, 108 aa, Homo sapiens
DIQMTQSPSSLSASVGDRVTITCRATQWIGPYNNWYQQKPGKAPKPLIYMGSYLPSGVPSRFSGSGSGTDFTLTISSLQPEDFATYYCQQDLYPPFTFGQGTKVEIKR

SEQ ID NO: 1674 - protein, 108 aa, Homo sapiens
DIQMTQSPSSLSASVGDRVTITCRASQWIGPYSNWYQQKPGKAPKPLIYMGSYLPSGVPSRFSGSGSGTDFTLTISSLQPEDFATYYCQQDLYPPFTFGQGTKVEIKR

SEQ ID NO: 1675 - protein, 108 aa, Homo sapiens
  VARIANT 32: Xaa = Any Amino Acid
DIQMTQSPSSLSASVGDRVTITCRASQWIGPXSNWYQQKPGKAPKPLIYMGYWAPSGVPSRFSGSGSGTDFTLTISSLQPEDFATYYCQQDLYPPFTFGQGTKVEIKR

SEQ ID NO: 1676 - protein, 108 aa, Homo sapiens
DIQMTQSPSSLSASVGDRVTITCRATQWIGPYSNWYQQKPGKAPKPLIYMGSYLPSGVPSRFSGSGSGTDFTLTISSLQPEDFATYYCQQDLYPPFTFGQGTKVEIKR

SEQ ID NO: 1677 - protein, 108 aa, Homo sapiens; identical to SEQ ID NO: 576

SEQ ID NO: 1678 - protein, 108 aa, Homo sapiens; identical to SEQ ID NO: 577

SEQ ID NO: 1679 - protein, 108 aa, Homo sapiens; identical to SEQ ID NO: 578

SEQ ID NO: 1680 - protein, 108 aa, Homo sapiens; identical to SEQ ID NO: 579

SEQ ID NO: 1681 - protein, 108 aa, Homo sapiens; identical to SEQ ID NO: 580

SEQ ID NO: 1682 - protein, 108 aa, Homo sapiens; identical to SEQ ID NO: 581

SEQ ID NO: 1683 - protein, 108 aa, Homo sapiens
DIQMTQSPSSLSASVGDRVTITCRASQWIGPYLNWYQQKPGKAPKPLIYMGYWAPSGVPSRFSGSGSGTDFTLTISSLQPEDFATYYCQQDGRAPFTFGQGTKVEIKR

SEQ ID NO: 1684 - protein, 108 aa, Homo sapiens
DIQMTQSPSSLSASVGDRVTITCRASQWIGPYLNWYQQKPGKAPKPLIYMGSYLPSGVPSRFSGSGSGTDFTLTISSLQPEDFATYYCQQDLWPPFTFGQGTKVEIKR

SEQ ID NO: 1685 - protein, 108 aa, Homo sapiens
DIQMTQSPSSLSASVGDRVTITCRASQWIGPYLNWYQQKPGKAPKPLIYMGSYLPSGVPSRFSGSGSGTDFTLTISSLQPEDFATYYCQQDLFPPFTFGQGTKVEIKR

SEQ ID NO: 1686 - protein, 108 aa, Homo sapiens
DIQMTQSPSSLSASVGDRVTITCRASRWIGPYLNWYQQKPGKAPKPLIYMGSYLPSGVPSRFSGSGSGTDFTLTISSLQPEDFATYYCQQDVFPPFTFGQGTKVEIKR

SEQ ID NO: 1687 - protein, 108 aa, Homo sapiens
DIQMTQSPSSLSASVGDRVTITCRASQWIGPYLNWYQQKPGKAPKPLIYMGSYLPSGVPSRFSGSGSGTDFTLTISSLQPEDFATYYCQQDGWAPFTFGQGTKVEIKR

SEQ ID NO: 1688 - protein, 108 aa, Homo sapiens
DIQMTQSPSSLSASVGDRVTITCRASQWIGPYLNWYQQKPGKAPKPLIYMGSYLPSGVPSRFSGSGSGTDFTLTISSLQPEDFATYYCQQDVSPPFTFGQGTKVEIKR

SEQ ID NO: 1689 - protein, 108 aa, Homo sapiens
DIQMTQSPSSLSASVGDRVTITCRASQWIGPYLNWYQQKPGKAPKPLIYMGSYLPSGVPSRFSGSGSGTDFTLTISSLQPEDFATYYCQQDMSPPFTFGQGTKVEIKR

SEQ ID NO: 1690 - protein, 108 aa, Homo sapiens
DIQMTQSPSSLSASVGDRVTITCRASQWIGPYLNWYQQKPGKAPKPLIYMGSYLPSGVPSRFSGSGSGTDFTLTISSLQPEDFATYYCQQDLLPPFTFGQGTKVEIKR

SEQ ID NO: 1691 - protein, 108 aa, Homo sapiens
DIQMTQSPSSLSASVGDRVTITCRASQWIGPYLNWYQQKPGKAPKPLIYMGSYLPSGVPSRFSGSGSGTDFTLTISSLQPEDFATYYCQQDLFVPFTFGQGTKVEIKR

SEQ ID NO: 1692 - protein, 108 aa, Homo sapiens
DIQMTQSPSSLSASVGDRVTITCRASQWIGPYLNWYQQKPGKAPKPLIYMGSYLPSGVPSRFSGSGSGTDFTLTISSLQPEDFATYYCQQDLVPPFTFGQGTKVEIKR

SEQ ID NO: 1693 - protein, 108 aa, Homo sapiens; identical to SEQ ID NO: 1692

SEQ ID NO: 1694 - protein, 108 aa, Homo sapiens
DIQMTQSPSSLSASVGDRVTITCRASQWIGPYLNWYQQKPGKAPKPLIYMGSYLPSGVPSRFSGSGSGTDFTLTISSLQPEDFATYYCQQDLYPPFFFGQGTKVEIKR

SEQ ID NO: 1695 - protein, 108 aa, Homo sapiens
DIQMTQSPSSLSASVGDRVTITCRASQWIGPYLNWYQQKPGKAPKPLIYMGSYLPSGVPSRFSGSGSGTDFTLTISSLQPEDFATYYCQQDFYPPFTFGQGTKVEIKR

SEQ ID NO: 1696 - protein, 108 aa, Homo sapiens; identical to SEQ ID NO: 1690

SEQ ID NO: 1697 - protein, 108 aa, Homo sapiens
DIQMTQSPSSLSASVGDRVTITCRASQWIGPYLNWYQQEPGKAPKPLIYMGSYLPSGVPSRFSGSGSGTDFTLTISSLQPEDFATYYCQQDASPPFTFGQGTKVEIKR

SEQ ID NO: 1698 - protein, 108 aa, Homo sapiens
DIQMTQSPSSLSASVGDRVTITCRASQWIGPYLNWYQQKPGKAPKPLIYMGSYLPSGVPSRFSGSGSGTDFTLTISSLQPEDFATYYCQQDVYPPFTFGQGTKVEIKR

SEQ ID NO: 1699 - protein, 108 aa, Homo sapiens
DIQMTQSPSSLSASVGDRVTITCRASQWIGPYLNWYQQKPGKAPKPLIYMGSYLPNGVPSRFSGSGSGTDFTLTISSLQPEDFATYYCQQDLIPPFTFGQGTKVEIKR

SEQ ID NO: 1700 - protein, 108 aa, Homo sapiens
DIQMTQSPSSLSASVGDRVTITCRASQWIGPYLNWYQQKPGKAPKPLIYMGSYLPSGVPSRFSGSGSGTDFTLTISSLQPEDFATYYCQQDIYPPFTFGQGTKVEIKR

SEQ ID NO: 1701 - protein, 108 aa, Homo sapiens
DIQMTQSPSSLSASVGDRVTITCRASQWIGPYLNWYQQKPGKAPKPLIYMGSYLPSGVPSRFSGSGSGTDFTLTISSLQPEDFATYYCQQDLLSPFTFGQGTKVEIKR

SEQ ID NO: 1702 - protein, 108 aa, Homo sapiens
DIQMTQSPSSLSASVGDRVTITCRASQWIGPYLNWYQQKPGKAPKPLIYMGYWAPSGVPSRFSGSGSGTDFTLTISSLQPEDFATYYCQQDVFFPFTFGQGTKVEIKR

SEQ ID NO: 1703 - protein, 108 aa, Homo sapiens
DIQMTQSPSSLSASVGDRVTITCRASQWIGPYLNWYQQKPGKAPKPLIYMGYWAPSGVPSRFSGSGSGTDFTLTISSLQPEDFATYYCQQDLFVPFTFGQGTKVEIKR

SEQ ID NO: 1704 - protein, 108 aa, Homo sapiens
DIQMTQSPSSLSASVGDRVTITCRASQWIGPYLNWYQQKPGKAPKPLIYMGYWAPSGVPSRFSGSGSGTDFTLTISSLQPEDFATYYCQQDLFFPFTFGQGTKVEIKR

SEQ ID NO: 1705 - protein, 108 aa, Homo sapiens
DIQMTQSPSSLSASVGDRVTITCRASQWIGPYLNWYQQKPGKAPKPLIYMGYWAPSGVPSRFSGSGSGTDFTLTISSLQPEDFATYYCQQDVVPPFTFGQGTKVEIKR

SEQ ID NO: 1706 - protein, 108 aa, Homo sapiens
DIQMTQSPSSLSASVGDRVTITCRASQWIGPYLNWYQQKPGKAPKPLIYMGYWAPSGVPSRFSGSGSGTDFTLTISSLQPEDFATYYCQQDMFPPFTFGQGTKVEIKR

SEQ ID NO: 1707 - protein, 108 aa, Homo sapiens
DIQMTQSPSSLSASVGDRVTITCRASQWIGPYLNWYQQKPGKAPKPLIYMGYWAPSGAPSRFSGSGSGTDFTLTISSLQPEDFATYYCQQDFYPPFTFGQGTKVEIKR

SEQ ID NO: 1708 - protein, 108 aa, Homo sapiens
DIQMTQSPSSLSASVGDRVTITCRASQWIGPYLNWYQQKPGKAPKPLIYMGYWAPSGVPSRFSGSGSGTDFTLTISSLQPEDFATYYCQQDILPPFTFGQGTKVEIKR

SEQ ID NO: 1709 - protein, 108 aa, Homo sapiens
DIQMTQSPSSLSASVGDRVTITCRASQWIGPYLNWYQQKPGKAPKPLIYMGYWAPSGVPSRFSGSGSGTDFTLTISSLQPEDFATYYCQQDVLPPFTFGQGTKVEIKR

SEQ ID NO: 1710 - protein, 108 aa, Homo sapiens
DIQMTQSPSSLSASVGDRVTITCRASQWIGPYLNWYQQKPGKAPKPLIYMGYWAPSGVPSRFSGSGSGTDFTLTISSLQPEDFATYYCQQDLYFPFTFGQGTKVEIKR

SEQ ID NO: 1711 - protein, 108 aa, Homo sapiens; identical to SEQ ID NO: 1549

SEQ ID NO: 1712 - protein, 108 aa, Homo sapiens
  VARIANT 96: Xaa = Any Amino Acid
DIQMTQSPSSLSASVGDRVTITCRASQWIGPYLNWYQQKPGKAPKPLIYMGYWAPSGVPSRFSGSGSGTDFTLTISSLQPEDFATYYCQQDLVPPXTFGQGTKVEIKR

SEQ ID NO: 1713 - protein, 108 aa, Homo sapiens
DIQMTQSPSSLSASVGDRVTITCRASQWIGPYLNWYQQKPGKAPKPLIYMGYWAPGGVPSRFSGSGSGTDFTLTIGSLQPEDFATYYCQQDVTPPFTFGQGTKVEIKR

SEQ ID NO: 1714 - protein, 108 aa, Homo sapiens; identical to SEQ ID NO: 1547

SEQ ID NO: 1715 - protein, 108 aa, Homo sapiens
DIQMTQSPSSLSASVGDRVTITCRASQWIGPYLNWYQQKPGKAPKPLIYMGYWAPSGVPSRFSGSGSGTDFTLTISSLQPEDFATYYCQQDVLWPFTFGQGTKVEIKR

SEQ ID NO: 1716 - protein, 108 aa, Homo sapiens
DIQMTQSPSSLSASVGDRVTITCRASQWIGPYLNWYQQKPGKAPKPLIYMGYWAPSGVPSRFSGSGSGTDFTLTISSLQPEDFATYYCQQDFYFPFTFGQGTKVEIKR

SEQ ID NO: 1717 - protein, 108 aa, Homo sapiens
DIQMTQSPSSLSASVGDRVTITCRASQWIGPYLNWYQQKPGKAPKPLIYMGYWAPSGVPSRFSGSGSGTDFTLTISSLQPEDFATYYCQQDSSPPFTFGQGTKVEIKR

SEQ ID NO: 1718 - protein, 108 aa, Homo sapiens
DIQMTQSPSSLSASVGDRVTITCRASQWIGPYLNWYQQKPGKAPKPLIYMGYWAPSGVPSRFSGSGSGTDFTLTISSLQPEDFATYYCQQDIYPPFTFGQGTKVEIKR

SEQ ID NO: 1719 - protein, 108 aa, Homo sapiens
DIQMTQSPSSLPASVGDRVTITCRASQWIGPYLNWYQQKPGKAPKPLIYMGYWAPSGVPSRFSGSGSGTDFTLTISSLQPEDFATYYCQQDLKAPFTFGQGTKVEIKR

SEQ ID NO: 1720 - protein, 108 aa, Homo sapiens
DIQMTQSPSSLSASVGDRVTITCRASQWIGPYLNWYQQKPGKAPKPLIYMGYWAPSGVPSRFSGSGSGTDFTLTISSLQPEDFATYYCQQDHLPPFTFGQGTKVEIKR

SEQ ID NO: 1721 - protein, 108 aa, Homo sapiens; identical to SEQ ID NO: 1549

SEQ ID NO: 1722 - protein, 108 aa, Homo sapiens
DIQMTQSPSSLSASVGDRVTITCRASQWIGPYLNWYQQKPGKAPKPLIYMGYWAPSGVPSRFSGSGSGTDFTLTISSLQPEDFATYYCQQDLFPPFTFGQGTKVEIKR

SEQ ID NO: 1723 - protein, 108 aa, Homo sapiens
DIQMTQSPSSLSASVGDRVTITCRASQWIGPYLNWYQQKPGKAPKPLIYMGYWAPSGVPSRFSGSGSGTDFTLTISSLQPEDFATYYCQQDVFPPFTFGQGTKVEIKR

SEQ ID NO: 1724 - protein, 108 aa, Homo sapiens; identical to SEQ ID NO: 1697

SEQ ID NO: 1725 - protein, 108 aa, Homo sapiens
DIQMTQSPSSLSASVGDRVTITCRASQWIGPYLNWYQQKPGKAPKPLIYMGYWAPSGVPSRFSGSGSGTDFTLTISSLQPEDFATYYCQQDGGEPFTFGQGTKVEIKR

SEQ ID NO: 1726 - protein, 108 aa, Homo sapiens
DIQMTQSPSSLSASVGDRVTITCRASQWIGPYLNWYQQKPGKAPKLLIYMGYWAQSGVPSRFSGSGSGTDFTLTISSLQPEDFATYYCQQDLYPPYTFGQGTKVEIKR

SEQ ID NO: 1727 - protein, 108 aa, Homo sapiens
DIQMTQSPSSLSASVGDRVTITCRASQNIDNYLYWYQQKPGKAPRLLIYRASYLQSGVPSRFSGSGSGTDFTLTISSLQPEDFATYYCQQLAILPITFGQGTKVEIKR

SEQ ID NO: 1728 - protein, 108 aa, Homo sapiens
DIQMTQSPSSLSASVGDRVTITCRASQTIDWGLNWYQQKPGKAPKLLIYTTSSLQSGVPSRFSGSGSGTDFTLTISSLQPEDFATYYCQQDSWHPPTFGQGTKVEIKR

SEQ ID NO: 1729 - protein, 108 aa, Homo sapiens
DIQMTQSPSSLSASVGDRVTITCRASQSIAWDLHWYQQKPGKAPKLLIYDMSMLQSGVPSRFSGSGSGTDFTLTISSLQPEDFATYYCQQTYRLPMTFGQGTKVEIKR

SEQ ID NO: 1730 - protein, 108 aa, Homo sapiens
DIQMTQSPSSLSASVGDRVTITCRASQWIMMHLNWYQQKPGKAPKLLIYNGSVLQSGVPSRFSGSGSGTDFTLTISSLQPEDFATYYCQQDIFHPPTFGQGTKVEIKR

SEQ ID NO: 1731 - protein, 108 aa, Homo sapiens
DIQLTQSPSSLSASVGDRVTITCRASQRIPWDLHWYQQKPGKAPKLLIYDASRLQSGVPSRFSGSGSGTDFTLTISSLQPEDFATYYCQQTYSLPFTFGQGTKVEIKR

SEQ ID NO: 1732 - protein, 108 aa, Homo sapiens
DIQLTQSPSSLSASVGDRVTITCRASQRIPWDLHWYQQKPGKAPKLLIYDTSRLQSGVPSRFSGSGSGTDFTLTISSLQPEDFATYYCQQTYSLPFTFGQGTKVEIKR

SEQ ID NO: 1733 - protein, 116 aa, Homo sapiens
EVQLLESGGGLVQPGGSLRLSCAASGFTFRNFGMGWVRQAPGKPLEWVSWIISSGTETYYADSVKGRFTISRDNSKNTLYLQMNSLRAEDTAVYYCAKSLGRFDYWGQGTLVTVSS

SEQ ID NO: 1734 - protein, 119 aa, Homo sapiens
EVQLLESGGGLVQPGGSLRLSCAASGFTFRNFGMGWVRQAPGKGLEWVSWIEGGGTETYYADSVKGRFTISRDNSKNTLYLQMNSLRAEDTAVYYCARLPKRGPWFDYRGQGTLVTVSS

SEQ ID NO: 1735 - protein, 116 aa, Homo sapiens
EVQLLESGGGLVQPGGSLRLSCAASGFTFRNFGMGWVRQAPGKGLEWVSWIISSGTETYYADSVKGRFTISRDNSKNTLYLQMNSLRAEDTAVYYCAKSLGRFDYFGQGTLVTVSS

SEQ ID NO: 1736 - protein, 108 aa, Homo sapiens
DIQTTQSPSSLSASVGDRVTITCRASQYIGRYLRWYQQKPGKAPKLLIYDSSVLQSGVPSRFSGSGSGTDFTLTISSLQPEDFATYYCQQRYRMPYTFGQGTRVEIKR

SEQ ID NO: 1737 - protein, 108 aa, Homo sapiens
DIQMTQSPSSLSASVGDRVTITCRASQYIGRYLRWYQQKPGKAPKLLIYDSSVLQSGVPSRFSGSGSGTDFTLTISSLQPEDFATYYCQQRYMQPFTFGQGTKVEIKR

SEQ ID NO: 1738 - protein, 108 aa, Homo sapiens
DIQMTQSPSSLSASVGDRVTITCRASQWIGRYLRWYQQKPGKAPKLLIYNGSQLQSGVPSRFSGSGSGTDFTLTISSLQPEDFATYYCQQRYLQPYTFGQGTKVEIKR

SEQ ID NO: 1739 - protein, 108 aa, Homo sapiens
DIQMTQSPSSLSASVGDRVTITCRASQYISRQLRWYQQKPGKAPRLLIYGASVLQSGIPSRFSGSGSGTDFTLTISSLQPEDFATYYCQQRYITPYTFGQGTKVEVKR

SEQ ID NO: 1740 - protein, 108 aa, Homo sapiens
DIQMTQSPSSLSASVGDRVTITCRASQYIGRYLRWYQQKPGKAPKLLIYDSSVLQSGVPSRFSGSGSGTDFTLTISSLQPEDFATYYCQQRYSSPYTFGQGTKVEIKR

SEQ ID NO: 1741 - protein, 108 aa, Homo sapiens
DIQMTQSPSSLSASVGDRVTITCRASQWIHRQLKWYQQKPGKAPKLLIYYASILQSGVPSRFSGSGSGTDFTLTISSLQPEDFATYYCQQTFSKPSTFGQGTKVEIKR

SEQ ID NO: 1742 - protein, 108 aa, Homo sapiens
DIQMTQSPSSLSASVGDRVTITCRASQKIATYLNWYQQKPGKAPKLLIYRSSSLQSAVPSRFSGSGSGTVFTLTISSLQPEDFATYYCQQTYAVPPTFGQGTKVEIKR

SEQ ID NO: 1743 - protein, 108 aa, Homo sapiens
DIQMTQSPSSLSASVGDRVTITCRASQWIDTGLAWYQQKPGKAPRLLIYNVSRLQSGVPSRFSGSGSGTDFTLTISSLQPEDFATYYCQQYWGSPTTFGQGTKVEIKR

SEQ ID NO: 1744 - protein, 108 aa, Homo sapiens
DIQMTQSPSSLSASVGDRVTITCRASQEIYSWLAWYQQRPGKAPKLLIYNASHLQSGVPSRFSGSGSGTDFTLTISSLQPEDFATYYCQQVIGDPVTFGQGTKVEIKR

SEQ ID NO: 1745 - protein, 108 aa, Homo sapiens
DIQMTQSPSSLSASVGDRVTITCRASQSISSYLNWYQQKPGKAPTLLIYRLSVLQSGVPSRFSGSGSGTDFTLTISSLQPEDFATYYCQQTYNVPPTFGQGTKVEIKR

SEQ ID NO: 1746 - protein, 108 aa, Homo sapiens
DIQMTQSPSSLSASVGDRVTITCRASQSISSYLNWYQQKPGKAPKLLIYRNSFLQSGVPSRFSGSGSGTDFTLTISSLQPEDFATYYCQQTYTVPPTFGQGTKVEIKQ

SEQ ID NO: 1747 - protein, 108 aa, Homo sapiens
DIQMTQSPSSLSASVGDRVTITCRASQSISSYLNWYQQKPGKAPKLLIYRNSQLQSGVPSRFSGSGSGTDFTLTISSLQPEDFATYYCQQTFAVPPTFGQGTKVEIKR

SEQ ID NO: 1748 - protein, 123 aa, Homo sapiens
EVQLLESGGGLVQPGGSLRLSCAASGFTFSKYWMSWVRQAPGKGLEWVSSIDFMGPHTYYADSVKGRFTISRDNSKNTLYLQMNSLRAEDTAVYYCAKGRTSMLPMKGKFDYWGQGTLVTVSS

SEQ ID NO: 1749 - protein, 118 aa, Homo sapiens
EVQLLESGGGLVQPGGSLRLSCAASGFTFYDYNMSWVRQAPGKGLEWVSTITHTGGVTYYADSVKGRFTISRDNSKNTLYLQMNSLRAEDTAVYYCAKQNPSYQFDYWGQGTLVTVSS

SEQ ID NO: 1750 - protein, 118 aa, Homo sapiens
EVQLLESGGGLVQPGGSLRLSCAASGFTFHRYSMSWVRQAPGKGLEWVSTILPGGDVTYYADSVKGRFTISRDNSKNTLYLQMNSLRAEDTAVYYCAKQTPDYMFDYWGQGTLVTVSS

SEQ ID NO: 1751 - protein, 117 aa, Homo sapiens
EVQLLESGGGLVQPGGSLRLSCAASGFTFWKYNMAWVRQAPGKGLEWVSTILGEGNNTYYADSVKGRFTISRDNSKNTLYLQMNSLRAEDTAVYYCAKTMDYKFDYWGQGTLVTVSS

SEQ ID NO: 1752 - protein, 118 aa, Homo sapiens
EVQLLESGGGLVQPGGSLRLSCTASGFTFDEYNMSWVRQAPGKGLEWVSTILPHGDRTYYADSVKGRFTISRDNSKNTLYLQMNSLRAEDTAVYYCAKQDPLYRFDYWGQGTLVTVSS

SEQ ID NO: 1753 - protein, 120 aa, Homo sapiens
EVQLLESGGGLVQPGGSLRLSCAASGFTFDLYDMSWVRQAPGKGLEWVSSIVNSGVRTYYADSVKGRFTISRDNSKNTLYLQMNSLRAEDTAVYYCAKLNQSYHWDFDYWGQGTLVTVSS

SEQ ID NO: 1754 - protein, 118 aa, Homo sapiens
EVQLLESGGGLVQPGGSLRLSCAASGFTFSDYRMSWVRQAPGKGLEWVSTIISNGKFTYYADSVKGRFTISRDNSKNTLYLQMNSLRAEDTAVYYCAKQDWMYMFDYWGQGTLVTVSS

SEQ ID NO: 1755 - protein, 35 aa, Artificial Sequence
  VARIANT 30, 31: Xaa = Any Amino Acid
  Consensus
EVQLLESGGGLVQPGGSLRLSCAASGFTFXXYNMS

SEQ ID NO: 1756 - protein, 108 aa, Homo sapiens
DIQMTQSPSSLSASVGDRVTITCRASQSISSYLNWYQQKPGKAPKLLIYRNSPLQSGVPSRFSGSGSGTDFTLTISSLQPEDFATYYCQQTYRVPPTFGQGTKVEIKR

SEQ ID NO: 1757 - protein, 108 aa, Homo sapiens
DIQMTQSPSSLSASVGDRVTITCRASQHIHRELRWYQQKPGKAPKLLIYQASRLQSGVPSRFSGSGSGTDFTLTISSLQPEDFATYYCQQKYLPPYTFGQGTKVEIKR

SEQ ID NO: 1758 - protein, 108 aa, Homo sapiens
DIQMTQSPSSLSASVGDRVTITCRASQHIHRELRWYQQKPGKAPKLLIYQASRLQSGVPSRFSGSGSGTDFTLTISSLQPEDFATYYCQQRYRVPYTFGQGTKVEIKR

SEQ ID NO: 1759 - protein, 108 aa, Homo sapiens
DIQMTQSPSSLSASVGDRVTITCRASQSIGRRLKWYQQKPGAAPRLLIYRTSWLQSGVPSRFSGSGSGTDFTLTISSLQPEDFATYYCQQTSQWPHTFGQGTKVEIKR

SEQ ID NO: 1760 - protein, 108 aa, Homo sapiens
DIQMTQSPSSLSASVGDRVTITCRASQKIYKNLRWYQQKPGKAPKLLIYNSSILQSGVPSRFSGSGSGTDFTLTISSLQPEDFATYYCQQRYLSPYTFGQGTKVEIKR

SEQ ID NO: 1761 - protein, 108 aa, Homo sapiens
DIQMTQSPSSLSASVGDRVTITCRASQKIYNNLRWYQQKPGKAPKLLIYNTSILQSGVPSRFSGSGSGTDFTLTISSLQPEDFATYYCQQRWRAPYTFGQGTKVEIKR

SEQ ID NO: 1762 - protein, 108 aa, Homo sapiens
DIQMTQSPSSLSASVGDRVTITCRASQWIYKSLGWYQQKPGKAPKLLIYQSSLLQSGVPSRFSGSGSGTDFTLTISSLQPEDFATYYCQQYHQMPRTFGQGTKVEIKR

SEQ ID NO: 1763 - protein, 108 aa, Homo sapiens
DIQMTQSPSSLSASVGDRVTITCRASQWIYRHLRWYQQKPGKAPKLLIYDASRLQSGVPTRFSGSGSGTDFTLTISSLQPEDFATYYCQQTHNPPKTFGQGTKVEIKR

SEQ ID NO: 1764 - protein, 116 aa, Homo sapiens
EVQLLESGGGLVQPGGSLRLSCAASGFTFWPYTMSWVRQAPGKGLEWVSTISPFGSTTYYADSVKGRFTISRDNSKNTLYLQMNSLRAEDTAVYYCAKGGKDFDYWGQGTLVTVSS

SEQ ID NO: 1765 - protein, 117 aa, Homo sapiens
EVQLLESGGGLVQPGGSLRLSCAASGFTFWPYTMSWVRQAPGKGLEWVSTISPFGSTTYYADSVKGRFTISRDNSKNTLYLQMNSLRAEDTAVYYCAKGNLEPFDYWGQGTLVTVSS

SEQ ID NO: 1766 - protein, 117 aa, Homo sapiens
EVQLLESGGGLVQPGGSLRLSCAASGFTFWPYTMSWVRQAPGKGLEWVSTISPFGSTTYYADSVKGRFTISRDNSKNTLYLQMNSLRAEDTAVYYCAKKLSNGFDYWGQGTLVTVSS

SEQ ID NO: 1767 - protein, 118 aa, Homo sapiens
EVQLLESGGGLVQPGGSLRLSCAASGFTFWPYTMSWVRQAPGKGLEWVSTISPFGSTTYYADSVKGRFTISRDNSKNTLYLQMNSLRAEDTAVYYCAKVVKDNTFDYWGQGTLVTVSS

SEQ ID NO: 1768 - protein, 118 aa, Homo sapiens
EVQLLESGGGLVQPGGSLRLSCAASGFTFWPYTMSWVRQAPGKGLEWVSTISPFGSTTYYADSVKGRFTISRDNSKNTLYLQMNSLRAEDTAVYYCAKNTGGKQFDYWGQGTLVTVSS

SEQ ID NO: 1769 - protein, 118 aa, Homo sapiens
EVQLLESGGGLVQPGGSLRLSCAASGFTFWPYTMSWVRQAPGKGLEWVSTISPFGSTTYYADSVKGRFTISRDNSKNTLYLQMNSLRAEDTAVYYCAKKTGPSSFDYWGQGTLVTVSS

SEQ ID NO: 1770 - protein, 120 aa, Homo sapiens
EVQLLESGGGLVQPGGSLRLSCAASGFTFWPYTMSWVRQAPGKGLEWVSTISPFGSTTYYADSVKGRFTISRDNSKNTLYLQMNSLRAEDTAVYYCAKRTENRGVSFDYWGQGTLVTVSS

SEQ ID NO: 1771 - protein, 122 aa, Homo sapiens
EVQLLESGGGLVQPGGSLRLSCAASGFTFWPYTMSWVRQAPGKGLEWVSTISPFGSTTYYADSVKGRFTISRDNSKNTLYLQMNSLRAEDTAVYYCAKSDVLKTGLDGFDYWGQGTLVTVSS

SEQ ID NO: 1772 - protein, 120 aa, Homo sapiens
EVQLLESGGGLVQPGGSLRLSCAASGFTFMAYQMAWVRQAPGKGLEWVSTIHQTGFSTYYADSVKGRFTISRDNSKNTLYLQMNSLRAEDTAVYYCAKVRSMRPYKFDYWGQGTLVTVSS

SEQ ID NO: 1773 - protein, 120 aa, Homo sapiens
EVQLLESGGGLVQPGGSLRLSCAASGFTFKDYDMTWVRQAPGKGLEWVSMISSSGLWTYYADSVKGRFTISRDNSKNTLYLQMNSLRAEDTAVYYCAKGFRLFPRTFDYWGQGTLVTVSS

SEQ ID NO: 1774 - protein, 121 aa, Homo sapiens
EVQLLESGGGLVQPGGSLRLSCAASGFTFHDYVMGWARQAPGKGLEWVSLIKPNGSPTYYADSVKGRFTISRDNSKNTLYLQMNSLRAEDTAVYYCAKGRGRFNVLQFDYWGQGTLVTVSS

SEQ ID NO: 1775 - protein, 118 aa, Homo sapiens
EVQLLESGGGLVQPGGSLRLSCTASGFTFRHYRMGWVRQAPGKGLEWVSWIRPDGTFTYYADSVKGRFTISRDNSKNTLYLQMNSLRAEDTAVYYCAKSYMGDRFDYWGQGTLVTVSS

SEQ ID NO: 1776 - protein, 116 aa, Homo sapiens
EVQLLESGGGLVQPGGSLRLSCAASGFTFMWDKMGWVRQAPGKGLEWVSFIGREGYGTYYADSVKGRFTISRDNSKNTLYLQMNSLRAEDTAVYYCAKSVASFDYWGQGTLVTVSS

SEQ ID NO: 1777 - protein, 117 aa, Homo sapiens
EVQLLESGGGLVQPGGSLRLSCAASGFTFWAYPMSWVRQAPGKGLEWVSSISSWGTGTYYADSVKGRFTISRDNSKNTLYLQMNSLRAEDTAVYYCAKGGQGSFDYWGQGTLVTVSS

SEQ ID NO: 1778 - protein, 115 aa, Unknown
  Camelid
QVQLQESGGGLVQPGGSLPLSCEASGFTFSRFGMTWVRWAPGKGVEWVSGISSLGDSTLYADSVKGRFTISRDNAKNTLYLQMNSLKPEDTAVYYCTIGGSLNPGGQGTQVTVSS

SEQ ID NO: 1779 - protein, 115 aa, Unknown
  Camelid
QVQLQESGGGLVQPGNSLRLSCAASGFTFRNFGMSWVRQAPGKEPEWVSEISQSGENTIYADSVKDRFTISRDNAKSTLYLQMNSLKPEDTAVYYCTIGGSLSRSSQGTQVTVSS

SEQ ID NO: 1780 - protein, 114 aa, Unknown
  Camelid
QVQLQESGGGLVQPGGSLRLTCTASGFTFSSFGMSWVRQAPGKGLEWVSAISSDSGTKNYADSVKGRFTISRDNAKKMLFLQMNSLRPEDTAVYYCVIGRGSPSSQGTQVTVSS

SEQ ID NO: 1781 - protein, 114 aa, Unknown
  Camelid
QVQLQESGGGLVQPGGSLRLTCTASGFTFRSFGMSWVRQAPGKGLEWVSAISADGSDKRYADSVKGRFTISRDNGKKMLTLDMNSLKPEDTAVYYCVIGRGSPASQGTQVTVSS

SEQ ID NO: 1782 - protein, 128 aa, Unknown
  Camelid
AVQLVESGGGLVQAGDSLRLSCVVSGTTFSSAAMGWFRQAPGKEREFVGAIKWSGTSTYYTDSVKGRFTISRDNVKNTVYLQMNNLKPEDTGVYTCAADRDRYRDRMGPMTTTDFRFWGQGTQVTVSS

SEQ ID NO: 1783 - protein, 124 aa, Unknown
  Camelid
QVKLEESGGGLVQTGGSLRLSCAASGRTFSSFAMGWFRQAPGREREFVASIGSSGITTNYADSVKGRFTISRDNAKNTVYLQMNSLKPEDTGLCYCAVNRYGIPYRSGTQYQNWGQGTQVTVSS

SEQ ID NO: 1784 - protein, 120 aa, Unknown
  Camelid
EVQLEESGGGLVQPGGSLRLSCAASGLTFNDYAMGWYRQAPGKERDMVATISIGGRTYYADSVKGRFTISRDNAKNTVYLQMNSLKPEDTAIYYCVAHRQTVVRGPYLLWGQGTQVTVSS

SEQ ID NO: 1785 - protein, 123 aa, Unknown
  Camelid
QVQLVESGGKLVQAGGSLRLSCAASGRTFSNYAMGWFRQAPGKEREFVAGSGRSNSYNYYSDSVKGRFTISRDNAKNTVYLQMNSLKPEDTAVYYCAASTNLWPRDRNLYAYWGQGTQVTVSS

SEQ ID NO: 1786 - protein, 125 aa, Unknown
  Camelid
EVQLVESGGGLVQAGDSLRLSCAASGRSLGIYRMGWFRQVPGKEREFVAAISWSGGTTRYLDSVKGRFTISRDSTKNAVYLQMNSLKPEDTAVYYCAVDSSGRLYWTLSTSYDYWGQGTQVTVSS

SEQ ID NO: 1787 - protein, 125 aa, Unknown
  Camelid
QVQLVEFGGGLVQAGDSLRLSCAASGRSLGIYKMAWFRQVPGKEREFVAAISWSGGTTRYIDSVKGRFTLSRDNTKNMVYLQMNSLKPDDTAVYYCAVDSSGRLYWTLSTSYDYWGQGTQVTVSS

SEQ ID NO: 1788 - protein, 124 aa, Unknown
  Camelid
EVQLVESGGGLVQAGGSLSLSCAASGRTFSPYTMGWFRQAPGKEREFLAGVTWSGSSTFYGDSVKGRFTASRDSAKNTVTLEMNSLNPEDTAVYYCAAAYGGGLYRDPRSYDYWGRGTQVTVSS

SEQ ID NO: 1789 - protein, 131 aa, Unknown
  Camelid
AVQLVESGGGLVQAGGSLRLSCAASGFTLDAWPIAWFRQAPGKEREGVSCIRDGTTYYADSVKGRFTISSDNANNTVYLQTNSLKPEDTAVYYCAAPSGPATGSSHTFGIYWNLRDDYDNWGQGTQVTVSS

SEQ ID NO: 1790 - protein, 126 aa, Unknown
  Camelid
EVQLVESGGGLVQAGGSLRLSCAASGFTFDHYTIGWFRQVPGKEREGVSCISSSDGSTYYADSVKGRFTISSDNAKNTVYLQMNTLEPDDTAVYYCAAGGLLLRVEELQASDYDYWGQGIQVTVSS

SEQ ID NO: 1791 - protein, 128 aa, Unknown
  Camelid
AVQLVDSGGGLVQPGGSLRLSCTASGFTLDYYAIGWFRQAPGKEREGVACISNSDGSTYYGDSVKGRFTISRDNAKTTVYLQMNSLKPEDTAVYYCATADRHYSASHHPFADFAFNSWGQGTQVTVSS

SEQ ID NO: 1792 - protein, 120 aa, Unknown
  Camelid
EVQLVESGGGLVQAGGSLRLSCAAYGLTFWRAAMAWFRRAPGKERELVVARNWGDGSTRYADSVKGRFTISRDNAKNTVYLQMNSLKPEDTAVYYCAAVRTYGSATYDIWGQGTQVTVSS

SEQ ID NO: 1793 - protein, 123 aa, Unknown
  Camelid
EVQLVESGGGLVQDGGSLRLSCIFSGRTFANYAMGWFRQAPGKEREFVAAINRNGGTTNYADALKGRFTISRDNTKNTAFLQMNSLKPDDTAVYYCAAREWPFSTIPSGWRYWGQGTQVTVSS

SEQ ID NO: 1794 - protein, 125 aa, Unknown
  Camelid
DVQLVESGGGWVQPGGSLRLSCAASGPTASSHAIGWFRQAPGKEREFVVGINRGGVTRDYADSVKGRFAVERDNVKNTVYLQMNRLKPEDSAIYICAARPEYSFTAMSKGDMDYWGKGTLVTVSS

SEQ ID NO: 1795 - DNA, 21 bp, Artificial Sequence
  Primer
cgcaaatgggcggtaggcgtg

SEQ ID NO: 1796 - DNA, 17 bp, Artificial Sequence
  Primer
tgagtgggtggagactg

SEQ ID NO: 1797 - DNA, 26 bp, Artificial Sequence
  Primer
ataccatggggtcgacggacatccag

SEQ ID NO: 1798 - DNA, 31 bp, Artificial Sequence
  Primer
ttcttttgcggccgcccgtttgatttccacc

SEQ ID NO: 1799 - DNA, 20 bp, Artificial Sequence
  Primer
ttcgctattacgccagctgg

SEQ ID NO: 1800 - DNA, 19 bp, Artificial Sequence
  Primer
cagtcaggcaccgtgtatg

SEQ ID NO: 1801 - DNA, 20 bp, Artificial Sequence
  Primer
aaagggggatgtgctgcaag

SEQ ID NO: 1802 - DNA, 21 bp, Artificial Sequence
  Primer
aacaatgcgctcatcgtcatc

SEQ ID NO: 1803 - protein, 7 aa, Artificial Sequence
  Linker
ASTKGPS

SEQ ID NO: 1804 - DNA, 354 bp, Homo sapiens
gaggtgcagctgttggagtctgggggaggcttggtacagcctggggggtccctgcgtctctcctgtgcagcctccggattcacctttcctaagtatgatatgatgtgggtccgccaggctccagggaagggtctagagtgggtctcatcgattgatcatctgggtgttaatacatactacgcagactccgtgaagggccggttcaccatctcccgcgacaattccaagaacacgctgtatctgcaaatgaacagcctgcgtgccgaggataccgcggtatattactgtgcgaaagagtctgattggccgagttttgactactggggtcagggaaccctggtcaccgtctcgagc

SEQ ID NO: 1805 - DNA, 348 bp, Homo sapiens
gaggtgcagctgttggagtctgggggaggcttggtacagcctggggggtccctgcgtctctcctgtgcagcctccggattcacctttgatgtttatgagatggattgggtccgccaggctccagggaagggtctagagtgggtctcatctattagtgcttatggtgatcagacatactacgcagactccgtgaagggccggttcaccatctcccgcgacaattccaagaacacgctgtatctgcaaatgaacagcctgcgtgccgaggataccgcggtatattactgtgcgaaatctggtactggttttgactactggggtcagggaaccctggtcaccgtctcgagc

SEQ ID NO: 1806 - DNA, 348 bp, Homo sapiens
gaggtgcagctgttggagtctgggggaggcttggtacagcctggggggtccctgcgtctctcctgtgcagcctccggattcacctttcctgatgcggagatggattgggtccgccaggctccagggaagggtctagagtgggtctcaacgattagtcctgagggtactaatacatactacgcagactccgtgaagggccggttcaccatctcccgcgacaattccaagaacacgctgtatctgcaaatgaacagcctgcgtgccgaggacaccgcggtatattactgtgcgaaagctggtatgtcgtttgactactggggtcagggaaccctggtcaccgtctcgagc

SEQ ID NO: 1807 - DNA, 348 bp, Homo sapiens
gaggtgcagctgttggagtctgggggaggcttggtacagcctggggggtccctgcgtctctcctgtgcagcctccggattcacctttccgtctgatgagatggattgggtccgccaggctccagggaagggtctagagtgggtctcagctattgatcctaagggttctcgtacatactacgcagactccgtgaagggccggttcaccatctcccgcgacaattccaagaacacgctgtatctgcaaatgaacagcctgcgtgccgaggacaccgcggtatattactgtgcgaaagcgggtagtgggtttgactactggggtcagggaaccctggtcaccgtctcgagc

SEQ ID NO: 1808 - DNA, 348 bp, Homo sapiens
gaggtgcagctgttggagtctgggggaggcttggtacagcctggggggtccctgcgtctctcctgtgcagcctccggattcacctttggggagtatgagatggattgggtccgccaggctccagggaagggtctagagtgggtctcatctattaattcggttggttttttgacatactacgcagactccgtgaagggccggttcaccatctcccgcgacaattccaagaacacgctgtatctgcaaatgaacagcctgcgtgccgaggacaccgcggtatattactgtgcgaaagcggggtcttcttttgactactggggtcagggaaccctggtcaccgtctcgagc

SEQ ID NO: 1809 - DNA, 348 bp, Homo sapiens
gaggtgcagctgttggagtctgggggaggcttggtacagcctggggggtccctgcgtctctcctgtgcagcctccggattcacctttaaggaggtggagatggattgggtccgccaggctccagggaagggtctagagtgggtctcaacgattgatgggagtggtgttggtacatactacgcagactccgtgaagggccggttcaccatctcccgcgacaattccaagaacacgctgtatctgcaaatgaacagcctgcgtgccgaggacaccgcggtatattactgtgcgaaaggtggtacttcttttgactactggggtcagggaaccctggtcaccgtctcgagc

SEQ ID NO: 1810 - DNA, 348 bp, Homo sapiens
gaggtgcagctgttggagtctgggggaggcttggtagagcctggggggtccctgcgtctctcctgtgcagcctccggattcacctttcatgagtctgagatggattgggtccgccaggctccagggaagggtctagagtgggtctcaacgattaatggttctggtgagagtacatactacgcagactccgtgaagggccggttcaccatctcccgcgacaattccaagaacacgctgtatctgcaaatgaacagcctgcgtgccgaggacaccgcggtatattactgtgcgaaagcgggtactagttttgactactggggtcagggaaccctggtcaccgtctcgagc

SEQ ID NO: 1811 - DNA, 348 bp, Homo sapiens
gaggtgcagctgttggagtctgggggaggcttggtacagcctggggggtccctgcgtctctcctgcgcagcctccggattcacctttcatactatggagatggattgggtccgccaggctccagggaagggtctagagtgggtctcaacgattgatggtcttggtactcatacatactacgcagactccgtgaagggccggttcaccatctcccgcgacaattccaagaacacgctgtatctgcaaatgaacagcctgcgtgccgaggacaccgcggtatattactgtgcgaaagctggggattcgtttgactactggggtcagggaaccctggtcaccgtctcgagc

SEQ ID NO: 1812 - DNA, 348 bp, Homo sapiens
gaggtgcagctgttggagtctgggggaggcttggtacagcctggggggtccctgcgtctctcctgtgcagcctccggattcaccttttctgcgtatgagatggattgggtccgccaggctccagggaagggtctggagtgggtctcatcgatttcgcagcgtggtgagtttacatactacgcagactccgtgaagggccggttcaccatctcccgcgacaattccaagaacacgctgtatctgcaaatgaacagcctgcgtgccgaggataccgcggtatattactgtgcgaaatcgggtactgggtttgactactggggtcagggaaccctggtcaccgtctcgagc

SEQ ID NO: 1813 - DNA, 348 bp, Homo sapiens
gaggtgcagctgttggagtctgggggaggcttggtacagcctggggggtccctgcgtctctcctgtgcagcctccggattcacctttgcgagtcatgagatggattgggtccgccaggctccagggaagggtctagagtgggtctcagctattagtggtagtggtggtagcacatactacgcagactccgtgaagggccggttcaccatctcccgcgacaattccaagaacacgctgtatctgcaaatgaacagcctgcgtgccgaggataccgcggtatattactgtgcgaaagcgggtgatccgtttgactactggggtcagggaaccctggtcaccgtctcgagc

SEQ ID NO: 1814 - DNA, 348 bp, Homo sapiens
gaggtgcagctgttggagtctgggggaggcttggtacagcctggggggtccctgcgtctctcctgtgcagcctccggattcacctttgagtctactgatatggattgggtccgccaggctccagggaagggtctagagtgggtctcaactattgggcggtcgggtctagatacatactacgcagactccgtgaagggccggttcaccatctcccgcgacaattccaagaacacgctgtatctgcaaatgaacagcctgcgtgccgaggacaccgcggtatattactgtgcgaaagcgtatgatccgtttgactactggggtcagggaaccctggtcaccgtctcgagc

SEQ ID NO: 1815 - DNA, 348 bp, Homo sapiens
gaggtgcagctgttggagtctgggggaggcttggtacagcctggggggtccctgcgtctctcctgtgcagcctccggattcacctttatggattcggatatggattgggtccgccaggctccagggaagggtctagagtgggtctcaactatttcgcctagtggtgagctgacatactacgcagactccgtgaagggccggttcaccatctcccgcgacaattccaagaacacgctgtatctgcaaatgaacagcctgcgtgccgaggacaccgcggtatattactgtgcgaaagcgtatagtccttttgactactggggtcagggaaccctggtcaccgtctcgagc

SEQ ID NO: 1816 - DNA, 369 bp, Homo sapiens
gaggtgcagctgttggagtctgggggaggcttggtacagcctggggggtccctgcgtctctcctgtgcagcctccggattcacctttgagaattatgatatgatgtgggtccgccaggctccagggaagggtctagagtgggtctcaactattactcatcatggtattattacatattacgcagactccgtgaagggccggttcaccatctcccgcgacaattccaagaacacgctgtatctgcaaatgaacagcctgcgtgccgaggataccgcggtatattactgtgcgaaagaggaggattggacttttttgaagacggttgtttttgactactggggtcagggaaccctggtcaccgtctcgagc

SEQ ID NO: 1817 - DNA, 351 bp, Homo sapiens
gaggtgcaactgttggagtctgggggaggcttggtacagcctggggggtccctgcgtctctcctgcgcagcctccggattcacctttggggggtatgatatgagttgggtccgccaggctccagggaagggtctagagtgggtctcatctattgatggtgtgggtcctcatacatactacgcagactccgtgaagggccggttcaccatctcccgcgacaattccaagaacacgctgtatctgcaaatgaacagcctgcgtgccgaggataccgcggtatattactgtgcgaaaggttttggtctgggttttgactactggggtcagggaaccctggtcaccgtctcgagc

SEQ ID NO: 1818 - DNA, 348 bp, Homo sapiens
gaggtgcagctgttggagtctgggggaggcttggtacagcctggggggtccctgcgtctctcctgtgcagcctccggattcacctttgagctggaggagatggattgggtccgccaggctccagggaagggtctagagtgggtctcatctattagtggtagtggtggtagcacatactacgcagactccgtgaagggccggttcaccatctcccgcgacaattccaagaacacgctgtatctgcaaatgaacagcctgcgtgccgaggacaccgcggtatattactgtgcgaaagcttatactgggtttgactactggggtcagggaaccctggtcaccgtctcgagc

SEQ ID NO: 1819 - DNA, 348 bp, Homo sapiens
gaggtgcagctgttggagtctgggggaggcttggtacagcctggggggtccctgcgtctctcctgtgcagcctccggattcacctttgaggatactgagatggattgggtccgccaggctccagggaagggtctagagtgggtctcaagtatttctgggaatggtaattcgacatactacgcagactccgtgaagggccggttcaccatctcccgcgacaattccaagaacacgctgtatctgcaaatgaacagcctgcgtgccgaggacaccgcggtatattactgtgcgaaagcttttacgccttttgactactggggtcagggaaccctggtcaccgtctcgagc

SEQ ID NO: 1820 - DNA, 348 bp, Homo sapiens
gaggtgcagctgttggagtctgggggaggcttggtacagcctggggggtccctgcgtctctcctgtgcagcctccggattcacctttcctgatgcggagatggattgggtccgccaggctccagggaagggtctagagtgggtctcaactattagtgattcgggtgttcatacatactacgcagactccgtgaagggccggttcaccatctcccgcgacaattccaagaacacgctgtatctgcaaatgaacagcctgcgtgccgaggataccgcggtatattactgtgcgaaagcggggactagttttgactactggggtcagggaaccctggtcaccgtctcgagc

SEQ ID NO: 1821 - DNA, 348 bp, Homo sapiens
gaggtgcagctgttggagtctgggggaggcttggtacagcctggggggtccctgcgtctctcctgtgcagcctccggattcacctttgataatagtgagatggattgggtccgccaggctccagggaagggtctagagtgggtctcaacgatttcgggtaagggttcgacgacatactacgcagactccgtgaagggccggttcaccatctcccgcgacaattccaagaacacgctgtatctgcaaatgaacagcctgcgtgccgaggacaccgcggtatattactgtgcgaaagcgggtacggggtttgactactggggtcagggaaccctggtcaccgtctcgagc

SEQ ID NO: 1822 - DNA, 348 bp, Homo sapiens
gaggtgcagctgttggagtctgggggaggcttggtacagcctggggggtccctgcgtctctcctgtgcagcctccggattcacctttcagtctagtgagatggattgggtccgccaggctccagggaagggtctagagtgggtctcaactattgggtctagtggtgatgatacatactacgcagactccgtgaagggccggttcaccatctcccgcgacaattccaagaacacgctgtatctgcaaatgaacagcctgcgtgccgaggacaccgcggtatattactgtgcgaaagcttttactagttttgactactggggtcagggaaccctggtcaccgtctcgagc

SEQ ID NO: 1823 - DNA, 348 bp, Homo sapiens
gaggtgcagctgttggagtctgggggaggcttggtacagcctggggggtccctgcgtctctcctgtgcagcctccggattcacctttcctcattcggagatggattgggtccgccaggctccagggaagggtctagagtgggtctcaagtatttctgggggtggtgatactacatactacgcagactccgtgaagggccggttcaccatctcccgcgacaattccaagaacacgctgtatctgcaaatgaacagcctgcgtgccgaggacaccgcggtatattactgtgcgaaagcgggtacgggttttgactactggggtcagggaaccctggtcaccgtctcgagc

SEQ ID NO: 1824 - DNA, 351 bp, Homo sapiens; identical to SEQ ID NO: 1817

SEQ ID NO: 1825 - DNA, 348 bp, Homo sapiens
gaggtgcagctgttggagtctgggggaggcttggtacagcctggggggtccctgcgtctctcctgtgcagcctccggattcacctttgggtggtatgatatgatgtgggtccgccaggctccagggaagggtctagagtgggtctcagggattacttttgatggtcattctacatactacgcagactccgtgaagggccggttcaccatctcccgcgacaattccaagaacacgctgtatctgcaaatgaacagcctgcgtgccgaggacaccgcggtatattactgtgcgaaagagggggttaattttgactactggggtcagggaaccctggtcaccgtctcgagc

SEQ ID NO: 1826 - DNA, 348 bp, Homo sapiens; identical to SEQ ID NO: 1814

SEQ ID NO: 1827 - DNA, 348 bp, Homo sapiens
gaggtgcagctgttggagtctgggggaggcttggtacagcctggggggtccctgcgtctctcctgtgcagcctccggattcaccttttatgattatgagatggattgggtccgccaggctccagggaagggtctagagtgggtctcaactatttcggctactggtgattctacatactacgcagactccgtgaagggccggttcaccatctcccgcgacaattccaagaacacgctgtatctgcaaatgaacagcctgcgtgccgaggataccgcggtatattactgtgcgaaagcgtatacgtcgtttgactactggggtcagggaaccctggtcaccgtctcgagc

SEQ ID NO: 1828 - DNA, 348 bp, Homo sapiens
gaggtgcagctgttggagtctgggggaggcttggtacagcctggggggtccctgcgtctctcctgtgcagcctccggattcacctttaaggattatgagatggattgggtccgccaggctccagggaagggtctagagtgggtctcagcgattactccggatggtcagactacatactacgcagactccgtgaagggccggttcaccatctcccgcgacaattccaagaacacgctgtatctgcaaatgaacagcctgcgtgccgaggacaccgcggtatattactgtgcgaaagctgggacttcgtttgactactggggtcagggaaccctggtcaccgtctcgagc

SEQ ID NO: 1829 - DNA, 348 bp, Homo sapiens
gaggtgcagctgttggagtctgggggaggcttggtacagcctggggggtccctgcgtctctcctgtgcagcctccggattcaccttttctgattatgagatggattgggtccgccaggctccagggaagggtctagagtgggtctcaagtattgataatagtggtttttcgacatactacgcagactccgtgaagggccggttcaccatctcccgcgacaattccaagaacacgctgtatctgcaaatgaacagcctgcgtgccgaggacaccgcggtatattactgtgcgaaagcgttttcgacttttgactactggggtcagggaaccctggtcaccgtctcgagc

SEQ ID NO: 1830 - DNA, 348 bp, Homo sapiens
gaggtgcagctgttggagtctgggggaggcttggtacagcctggggggtccctgcgtctctcctgtgcagcctccggattcacctttactaattatgagatggattgggtccgccaggctccagggaagggtctagagtgggtctcaacgattaatccgactggtcagtctacatactacgcagactccgtgaagggccggttcaccatctcccgcgacaattccaagaacacgctgtatctgcaaatgaacagcctgcgtgccgaggacaccgcggtatattactgtgcgaaagcttttacgccttttgactactggggtcagggaaccctggtcaccgtctcgagc

SEQ ID NO: 1831 - DNA, 348 bp, Homo sapiens
gaggtgcagctgttggagtctgggggaggcttggtacagcctggggggtccctgcgtctctcctgtgcagcctccggattcacctttgctaattatgagatggattgggtccgccaggctccagggaagggtctagagtgggtctcaactatttctaagatgggtgcggatacatactacgcagactccgtgaagggccggttcaccatctcccgcgacaattccaagaacacgctgtatctgcaaatgaacagcctgcgtgccgaggacaccgcggtatattactgtgcgaaagcgtggtcgggttttgactactggggtcagggaaccctggtcaccgtctcgagc

SEQ ID NO: 1832 - DNA, 348 bp, Homo sapiens
gaggtgcagctgttggagtctgggggaggcttggtacagcctggggggtccctgcgtctctcctgtgcagcctccggattcacctttgataatagtgagatggattgggtccgccaggctccagggaagggtctggagtgggtctcaacgatttctgtgcatggtgcggatacatactacgcagactccgtgaagggccggttcaccatctcccgcgacaattccaagaacacgctgtatctgcaaatgaacagcctgcgtgccgaggataccgcggtatattactgtgcgaaagcggggactagttttgactactggggtcagggaaccctggtcaccgtctcgagc

SEQ ID NO: 1833 - DNA, 348 bp, Homo sapiens
gaggtgcagctgttggagtctgggggaggcttggtacagcctggggggtccctgcgtctctcctgtgcagcctccggattcacctttgagatgagtgagatggattgggtccgccaggctccagggaagggtctagagtgggtctcagctattagtggtagtggtggtagcacatactacgcagactccgtgaagggccggttcaccatctcccgcgacaattccaagaacacgctgtatctgcaaatgaacagcctgcgtgccgaggataccgcggtatattactgtgcgaaagctggtacgccttttgactactggggtcagggaaccctggtcaccgtctcgagc

SEQ ID NO: 1834 - DNA, 348 bp, Homo sapiens
gaggtgcagctgttggagtctgggggaggcttggtacagcctggggggtccctgcgtctctcctgtgcagcctccggattcacctttaaggggagtgagatggattgggtccgccaggctccagggaagggtctggagtgggtctcaacgatttctgctgatggtagggagacatactacgcagactccgtgaagggccggttcaccatctcccgcgacaattccaagaacacgctgtatctgcaaatgaacagcctgcgtgccgaggacaccgcggtatattactgtgcgaaatcgtatacttcttttgactactggggtcagggaaccctggtcaccgtctcgagc

SEQ ID NO: 1835 - DNA, 348 bp, Homo sapiens
gaggtgcagctgttggagtctgggggaggcttggtacagcctggggggtccctgcgtctctcctgtgcagcctccggattcaccttttcgatttatgagatggattgggtccgccaggctccagggaagggtctagagtgggtctcaacgatttctgctagtggtgatactacatactacgcagactccgtgaagggccggttcaccatctcccgcgacaattccaagaacacgctgtatctgcaaatgaacagcctgcgtgccgaggacaccgcggtatattactgtgcgaaagcggggagtccttttgactactggggtcagggaaccctggtcaccgtctcgagc

SEQ ID NO: 1836 - DNA, 348 bp, Homo sapiens
gaggtgcagctgttggagtctgggggaggcttggtacagcctggggggtccctgcgtctctcctgtgcagcctccggattcacctttgagatgtatgagatggattgggtccgccaggctccagggaagggtctggagtgggtctcatctattgatctggcgggtcttcatacatactacgcagactccgtgaagggccggttcaccatctcccgcgacaattccaagaacacgctgtatctgcaaatgaacagcctgcgtgccgaggataccgcggtatattactgtgcgaaagcgggtacggggtttgactactggggtcagggaaccctggtcaccgtctcgagc

SEQ ID NO: 1837 - DNA, 348 bp, Homo sapiens
gaggtgcagctgttggagtctgggggaggcttggtacagcctggggggtccctgcgtctctcctgtgcagcctccggattcacctttagtcattatgagatggattgggtccgccaggctccagggaagggtctagagtgggtctcaactattggtcgtggtggtactaatacatactacgcagactccgtgaagggccggttcaccatctcccgcgacaattccaagaacacgctgtatctgcaaatgaacagcctgcgtgccgaggacaccgcggtatattactgtgcgaaaggggggactggttttgactactggggtcagggaaccctggtcaccgtctcgagc

SEQ ID NO: 1838 - DNA, 348 bp, Homo sapiens
gaggtgcagctgttggagtctgggggaggcttggtacagcctggggggtccctgcgtctctcctgtgcagcctccggattcacctttgatagttatgagatggattgggtccgccaggctccagggaagggtctagagtgggtctcaactattcatccgacgggtatgaatacatactacgcagactccgtgaagggccggttcaccatctcccgcgacaattccaagaacacgctgtatctgcaaatgaacagcctgcgtgccgaggacaccgcggtatattactgtgcgaaagcggggaatgggtttgactactggggtcagggaaccctggtcaccgtctcgagc

SEQ ID NO: 1839 - DNA, 348 bp, Homo sapiens; identical to SEQ ID NO: 1836

SEQ ID NO: 1840 - DNA, 348 bp, Homo sapiens
gaggtgcagctgttggagtctgggggaggcttggtacagcctggggggtccctgcgtctctcctgtgcagcctccggattcacctttccggatgttgagatggattgggtccgccaggctccagggaagggtctagagtgggtctcaagtattgatacttctggtggtctgacatactacgcagactccgtgaagggcaggttcaccatctcccgcgacaattccaagaacacgctgtatctgcaaatgaacagcctgcgtgccgaggataccgcggtatattactgtgcgaaatcttatagtccgtttgactactggggtcagggaaccctggtcaccgtctcgagc

SEQ ID NO: 1841 - DNA, 348 bp, Homo sapiens
gaggtgcagctgttggagtctgggggaggcttggtacagcctggggggtccctgcgtctctcctgtgcagcctccggattcacctttgagagtgcggagatggattgggtccgccaggttccagggaagggtctagagtgggtctcaacgatttctccgtctggtcatggtacatactacgcagactccgtgaagggccggttcaccatctcccgcgacaattccaagaacacgctgtatctgcaaatgaacagcctgcgtgccgaggacaccgcggtatattactgtgcgaaatcggggagtggttttgactactggggtcagggaaccctggtcaccgtctcgagc

SEQ ID NO: 1842 - DNA, 348 bp, Homo sapiens; identical to SEQ ID NO: 1806

SEQ ID NO: 1843 - DNA, 348 bp, Homo sapiens
gaggtgcagctgttggagtctgggggaggcttggtacagcctggggggtccctgcgtctctcctgtgcagcctccggattcacctttggggattatcagatggattgggtccgccaggctccagggaagggtctagagtgggtctcaactattaatgagaatggtactatgacatactacgcagactccgtgaagggccggttcaccatctcccgcgacaattccaagaacacgctgtatctgcaaatgaacagcctgcgtgccgaggataccgcggtatattactgtgcgaaagcgtatagtggttttgactactggggtcagggaaccctggtcaccgtctcgagc

SEQ ID NO: 1844 - DNA, 348 bp, Homo sapiens
gaggtgcagctgttggagtctgggggaggcttggtacagcctggggggtccctgcgtctctcctgtgcagcctccggattcaccttttcgtcgtatgggatggattgggtccgccaggctccagggaagggtctggagtgggtctcatctattagttctgatggtttgaatacatactacgcagactccgtgaagggccggttcaccatctcccgcgacaattccaagaacacgctgtatctgcaaatgaacagcctgcgtgccgaggataccgcggtatattactgtgcgaaattttatgatccgtttgactactggggtcagggaaccctggtcaccgtctcgagc

SEQ ID NO: 1845 - DNA, 348 bp, Homo sapiens
gaggtgcagctgttggagtctgggggaggcttggtacagcctggggggtccctgcgtctctcctgtgcagcctccggattcacctttaagagttatgggatggattgggtccgccaggctccagggaagggtctagagtgggtctcagcgattggtccgacgggtcgtgatacatactacgcagactccgtgaagggccggttcaccatctcccgcgacaattccaagaacacgctgtatctgcaaatgaacagcctgcgtgccgaggacaccgcggtatattactgtgcgaaagagtatacgccttttgactactggggtcagggaaccctggtcaccgtctcgagc

SEQ ID NO: 1846 - DNA, 348 bp, Homo sapiens
gaggtgcagctgttggagtctgggggaggcttggtacagcctggggggtccctgcgtctctcctgtgcagcctccggattcacctttgatgagtatggtatggattgggtccgccaggctccagggaagggtctagagtgggtctcaactattagtcctaatggtcagagtacatactacgcagactccgtgaagggccggttcaccatctcccgcgacaattccaagaacacgctgtatctgcaaatgaacagcctgcgtgtcgaggacaccgcggtatattactgtgcgaaagagtatgatagttttgactactggggtcagggaaccctggtcaccgtctcgagc

SEQ ID NO: 1847 - DNA, 348 bp, Homo sapiens
gaggtgcagctgttggagtctgggggaggcttggtacagcctggggggtccctgcgtctctcctgtgcagcctccggattcaccttttctgattatgatatggattgggtccgccaggctccagggaagggtctcgagtgggtctcaactattgagggtaggggtcgtaagacatactacgcagactccgtgaagggccggttcaccatctcccgcgacaattccaagaacacgctgtatctgcaaatgaacagcctgcgtgccgaggacactgcggtatattactgtgcgaaagcgtttacgaattttgactactggggtcagggaaccctggtcaccgtctcgagc

SEQ ID NO: 1848 - DNA, 348 bp, Homo sapiens
gaggtgcagctgttggagtctgggggaggcttggtacagcctggggggtccctgcgtctctcctgtgcagcctccggattcaccttttcttggtatgatatggattgggtccgccaggctccagggaagggtctagagtgggtctcaactattacttcgcatggtattgatacatactacgcagactccgtgaagggccggttcaccatctcccgcgacaattccaagaacacgctgtatctgcaaatgaacagcctgcgtgccgaggacaccgcggtatattactgtgcgaaagcttttgatccgtttgactactggggtcagggaaccctggtcaccgtctcgagc

SEQ ID NO: 1849 - DNA, 348 bp, Homo sapiens
gaggtgcagctgttggagtctgggggaggcttggtacagcctggggggtccctgcgtctctcctgtgcagcctccggattcacctttgatagggaggagatggattgggtccgccaggctccagggaagggtctagagtgggtctcaactattttgccgtcgggtaggaagacatactacgcagactccgtgaagggccggttcaccatctcccgcgacaattccaagaacacgctgtatctgcaaatgaacagcctgcgtgccgaggacaccgcggtatattactgtgcgaaagcttatactggctttaggtactggggtcagggaaccctggtcaccgtctcgagc

SEQ ID NO: 1850 - DNA, 348 bp, Homo sapiens
gaggtgcagctgttggagtctgggggaggcttggtacagcctggggggtccctgcgtctctcctgtgcagcctccggattcacctttgatagggaggagatggattgggtccgccaggctccagggaagggtcgagagtgggtctcaactatttcgccgcgcggtaggacgacatactacgcagactccgtgaggggccggttcaccatctcccgcgacaattccaagaacatgctgtatctgcaaatgaacggcctgcgtgccgaggacaccgcggtatattactgtgcgaaagcttatactgggtttaagtactggggtcagggaaccctggtcaccgtctcgagc

SEQ ID NO: 1851 - DNA, 348 bp, Homo sapiens
gaggtgcagctgttggagtctgggggaggcttggtacagcctggggggtccctgcgtctctcctgtgcagcctccggattcacctttcgggattatgagatggattgggtccgccaggctccagggaagggtcgagagtgggtctcaagtattgggccgtctggttcggagacatggtacgcagactccgtgaagggccggttcaccatctcccgcgacaattccaagaacacgctgtatctgcaaatgaacagcctgcgtgccgaggataccgcggtatattactgtgcgaaagcgtatacggggtttgggtactggggtcagggaaccctggtcaccgtctcgagc

SEQ ID NO: 1852 - DNA, 348 bp, Homo sapiens
gaggtgcagctgttggagtctgggggaggcttggtacagcctggggggtccctgcgtctctcctgtgcagcctccggattcacctttcgggattatgagatggattggatccgccaggctccagggaagggtctagagtgggtctcaagtattggtccgtctggttcgttcacacgctacgcagactccgtgaagggccggttcaccatctcccgcgacaattccaagaacacgctgtatctgcaaatgaacagcctgcgtgccgaggacaccgcggtatattactgtgcgaaagcgtatacggggtttaggtactggggtcagggaaccctggtcaccgtctcgagc

SEQ ID NO: 1853 - DNA, 348 bp, Homo sapiens
gaggtgcagctgttggagtctgggggaggcttggtacagcctggggggtccctgcgtctctcctgtgcagcctccggattcacctttaatctgtattctatggattgggtccgccaggctccagggaagggtctagagtgggtctcaactattgatcgtaatggtgagcgtacatactacgcagactccgtgaagggccggttcaccatctcccgcgacaattccaagaacacgctgtatctgcaaatgaacagcctgcgtgccgaggacaccgcggtatattactgtgcgaaagcttttgatggttttgactactggggtcagggaaccctggtcaccgtctcgagc

SEQ ID NO: 1854 - DNA, 360 bp, Homo sapiens
gaggtgcagctgttggagtctgggggaggcttggtacagcctggggggtccctgcgtctctcctgtgcagcctccggattcacctttaaggattatgatatgatgtgggtccgccaggctccagggaagggtctagagtgggtctcatctatttctgattggggtaggcggacatactacgcagactccgtgaagggccggttcaccatctcccgcgacaattccaagaacacgctgtatctgcaaatgaacagcctgcgtgccgaggacaccgcggtatattactgtgcgaaagaggcggcttgggcggaggggtcttttgactactggggtcagggaaccctggtcaccgtctcgagc

SEQ ID NO: 1855 - DNA, 357 bp, Homo sapiens
gaggtgcagctgttggagtctgggggaggcttggtacagcctggggggtccctgcgtctctcctgtgcagcctccggattcacctttgcgctgtatgatatgagttgggtccgccaggctccagggaagggtctagagtgggtctcaactattacgcctttgggttcgccgacatactacgcagactccgtgaagggccggttcaccatctcccgcgacgattccaagaacacgctgtatctgcaaatgaacagcctgcgtgccgaggataccgcggtatattactgtgcgaaagtgcattcggtggagaatgagtttgactactggggtcagggaaccctggtcaccgtctcgagc

SEQ ID NO: 1856 - DNA, 348 bp, Homo sapiens; identical to SEQ ID NO: 1805

SEQ ID NO: 1857 - DNA, 348 bp, Homo sapiens; identical to SEQ ID NO: 1832

SEQ ID NO: 1858 - DNA, 348 bp, Homo sapiens
gaggtgcagctgttggagtctgggggaggcttggtacagcctggggggtccctgcgtctctcctgtgcagcctccggattcacctttcaggatacggagatggattgggtccgccaggctccagggaagggtctagagtgggtctcaactattggtccgagtggtacttcgacatactacgcagactccgtgaagggccggttcaccatctcccgcgacaattccaagaacacgctgtatctgcaaatgaacagcctgcgtgccgaggacaccgcggtatattactgtgcgaaatcttattctggttttgactactggggtcagggaaccctggtcaccgtctcgagc

SEQ ID NO: 1859 - DNA, 348 bp, Homo sapiens
gaggtgcagctgttggagtctgggggaggcttggtacagcctggggggtccctgcgtctctcctgtgcagcctccggattcacctttaatgattatgagatggattgggtccgccaggctccagggaagggtctggagtgggtctcatcgattagtactaatggtatgcatacatactacgcagactccgtgaagggccggttcaccatctcccgcgacaattccaagaacacgctgtatctgcaaatgaacagcctgcgtgccgaggataccgcggtatattactgtgcgaaagcttttgatccttttgactactggggtcagggaaccctggtcaccgtctcgagc

SEQ ID NO: 1860 - DNA, 348 bp, Homo sapiens
gaggtgcagctgttggagtctgggggaggcttggtacagcctggggggtccctgcgtctctcctgtgcagcctccggattcaccttttctgatcatgagatggattgggtccgccaggctccagggaagggtctagagtgggtctcatctatttcgcctgctggtatgagtacatactacgcagactccgtgaagggccggttcaccatctcccgcgacaattccaagaacacgctgtatctgcaaatgaacagcctgcgtgccgaggacaccgcggtatattactgtgcgaaaggtggggatccttttgactactggggtcagggaaccctggtcaccgtctcgagc

SEQ ID NO: 1861 - DNA, 348 bp, Homo sapiens
gaggtgcagctgttggagtctgggggaggcttggtacagcctggggggtccctgcgtctctcctgtgcagcctccggattcaccttttcgcgggatgagatggattgggtccgccaggctccagggaagggtctagagtgggtctcaacgattgatgggcatggtttgcggacatactacgcagactccgtgaagggccggttcaccatctcccgcgacaattccaagaacacgctgtatctgcaaatgaacagcctgcgtgccgaggataccgcggtatattactgtgcgaaagctggttcgggttttgactactggggtcagggaaccctggtcaccgtctcgagc

SEQ ID NO: 1862 - DNA, 348 bp, Homo sapiens
gaggtgcagctgttggagtctgggggaggcttggtacagcctggggggtccctgcgtctctcctgtgcagcctccggattcacctttgagaagtatgagatggattgggtccgccaggctccagggaagggtctagagtgggtctcaactatcagtcctgatggtatggttacatactacgcagactccgtgaagggccggttcaccatctcccgcgacaattccaagaacacgctgtatctgcaaatgaacagcctgcgtgccgaggacaccgcggtatattactgtgcgaaagctgcttcgggttttgactactggggtcagggaaccctggtcaccgtctcgagc

SEQ ID NO: 1863 - DNA, 348 bp, Homo sapiens
gaggtgcagctgttggagtctgggggaggcttggtacagcctggggggtccctgcgtctctcctgtgcagcctccggattcacctttgagagtgcggagatggattgggtccgccaggctccagggaagggtctagagtgggtctcagctattgagcgtgatggtactactacatactacgcagactccgtgaagggccggttcaccatctcccgcgacaattccaagaacatgctgtatctgcaaatgaacagcctgcgtgccgaggacaccgcggtatattactgtgcgaaagctgggactccttttgactactggggtcagggaaccctggtcaccgtctcgagc

SEQ ID NO: 1864 - DNA, 348 bp, Homo sapiens
gaggtgcagctgttggagtctgggggaggcttggtacagcctggggggtccctgcgtctctcctgtgcagcctccggattcacctttccggagagtgagatggattgggtccgccaggctccagggaagggtctagagtgggtctcaactattagtccgcctggtaatttaacatactacgcagactccgtgaagggccggttcaccatctcccgcgacaattccaagaacacgctgtatctgcaaatgaacagcctgcgtgccgaggacaccgcggtatattactgtgcgaaagctggtgagggttttgactactggggtcagggaaccctggtcaccgtctcgagc

SEQ ID NO: 1865 - DNA, 348 bp, Homo sapiens
gaggtgcagctgttggagtctgggggaggcttggtacagcctggggggtccctgcgtctctcctgtgcagcctccggattcacctttgctggtatggagatggattgggtccgccaggctccagggaagggtctagagtgggtctcaacgattagtcctggtggtcaggatacatactacgcagactccgtgaagggccggttcaccatctcccgcgacaattccaagaacacgctgtatctgcaaatgaacagcctgcgtgccgaggacaccgcggtatattactgtgcgaaagcgggtgcgccgtttgactactggggtcagggaaccctggtcaccgtctcgagc

SEQ ID NO: 1866 - DNA, 348 bp, Homo sapiens
gaggtgcagctgttggagtctgggggaggcttggtacagcctggggggtccctgcgtctctcctgtgcagcctccggattcacctttgcgtggtatgagatggattgggtccgccaggctccagggaagggtctagagtgggtctcaactattaataattcgggtacgaagacatactacgcagactccgtgaagggccggttcaccatctcccgcgacaattccaagaacacgctgtatctgcaaatgaacagcctgcgtgccgaggataccgcggtatattactgtgcgaaagctggggagggttttgactactggggtcagggaaccctggtcaccgtctcgagc

SEQ ID NO: 1867 - DNA, 369 bp, Homo sapiens; identical to SEQ ID NO: 1816

SEQ ID NO: 1868 - DNA, 348 bp, Homo sapiens
gaggtgcagctgttggagtctgggggaggcttggtacagcctggggggtccctgcgtctctcctgtgcagcctccggattcacctttgctggttattcgatggattgggtccgccaggctccagggaagggtctagagtgggtctcaactatttctcctcgtggtgggggtacatactacgcagactccgtgaagggccggttcaccatctcccgcgacaattccaagaacacgctgtatctgcaaatgaacagcctgcgtgccgaggataccgcggtatattactgtgcgaaagagggtactggttttgcctactggggtcagggaaccctggtcaccgtctcgagc

SEQ ID NO: 1869 - DNA, 348 bp, Homo sapiens
gaggtgcagctgttggagtctgggggaggcttggtacagcctggggggtccctgcgtctctcctgtgcagcctccggattcacctttcgtaggtatgatatggattgggtccgccaggctccagggaagggtctagagtgggtctcatcgattactgggagtggtgctatgacatactacgcagactccgtgaagggccggttcaccatctcccgcgacaattccaagaacacgctgtatctgcaaatgaacagcctgcgtgccgaggacaccgcggtatattactgtgcgaaagcggggactggttttgactactggggtcagggaaccctggtcaccgtctcgagc

SEQ ID NO: 1870 - DNA, 348 bp, Homo sapiens
gaggtgcagctgttggagtctgggggaggcttggtacagcctggggggtccctgcgtctctcctgtgcagcctccggattcacctttggggattatcagatggattgggtccgccaggctccagggaagggtctagagtgggtctcatcgattactgggagtggtgctatgacatactacgcagactccgtgaagggccggttcaccatctcccgcgacaattccaagaacacgctgtatctgcaaatgaacagcctgcgtgccgaggacaccgcggtatattactgtgcgaaagcttatacggggtttgactactggggtcagggaaccctggtcaccgtctcgagc

SEQ ID NO: 1871 - DNA, 348 bp, Homo sapiens
gaggtgcagctgttggagtctgggggaggcttggtacagcctggggggtccctgcgtctctcctgtgcagcctccggattcacctttgatagggaggagatggattgggtccgccaggctccagggaagggtctagagtgggtctcaactatttcgccgtcgggtaggaagacatactacgcagactccgtgaagggccggttcaccatctcccgcgacaattccaagaacacgctgtatctgcaaatgaacagcctgcgtgccgaggacaccgcggtatattactgtgcgaaacatgggactggttttgactactggggtcagggaaccctggtcaccgtctcgagc

SEQ ID NO: 1872 - DNA, 348 bp, Homo sapiens
gaggtgcagctgttggagtctgggggaggcttggtacagcctggggggtccctgcgtctctcctgtgcagcctccggattcacctttcgggattatgagatggattgggtccgccaggctccagggaagggtctagagtgggtctcaagtattggtccgtctggttcggagacatactacgcagactccgtgaagggccggttcaccatctcccgcgacaattccaagaacacgctgtatctgcaaatgaacagcctgcgtgccgaggataccgcggtatattactgtgcgaaagcgtatacgtcgtttgactactggggtcagggaaccctggtcaccgtctcgagc

SEQ ID NO: 1873 - DNA, 348 bp, Homo sapiens
gaggtgcagctgttggagtctgggggaggcttggtacagcctggggggtccctgcgtctctcctgtgcagcctccggattcacctttagttcgtatgagatggattgggtccgccaggctccagggaagggtctagagtgggtctcaactatttcggcggatggtgttacgacatactacgcagactccgtgaagggccggttcaccatctcccgcgacaattccaagaacacgctgtatctgcaaatgaacagcctgcgtgccgaggacaccgcggtatattactgtgcgaaagcttttgatgcttttgactactggggtcagggaaccctggtcaccgtctcgagc

SEQ ID NO: 1874 - DNA, 348 bp, Homo sapiens
gaggtgcagctgttggagtctgggggaggcttggtacagcctggggggtccctgcgtctctcctgtgcagcctccggattcacctttgataagagtgagatggattgggtccgccaggctccagggaagggtctagagtgggtctcaactattgattcgaagggtcttcggacatactacgcagactccgtgaagggccggttcaccatctcccgcgacaattccaagaacacgctgtatctgcaaatgaacagcctgcgtgccgaggataccgcggtatattactgtgcgaaagcttttgcgggttttgactactggggtcagggaaccctggtcaccgtctcgagc

SEQ ID NO: 1875 - DNA, 348 bp, Homo sapiens
gaggtgcagctgttggagtctgggggaggcttggtacagcctggggggtccctgcgtctctcctgtgcagcctccggattcaccttttttgattatgagatggattgggtccgccaggctccagggaagggtctagagtgggtctcaacgatttcgaggaatggtatggttacatactacgcagactccgtgaagggccggttcaccatctcccgcgacaattccaagaacacgctgtatctgcaaatgaacagcctgcgtgccgaggacaccgcggtatattactgtgcgaaagcgggtacgccttttgactactggggtcagggaaccctggtcaccgtctcgagc

SEQ ID NO: 1876 - DNA, 348 bp, Homo sapiens
gaggtgcagctgttggagtctgggggaggcttggtacagcctggggggtccctgcgtctctcctgtgcagcctccggattcacctttaaggattatgagatggattgggtccgccaggctccagggaagggtctagagtgggtctcaactattgattcgaagggtcttcggacatactacgcagactccgtgaagggccggttcaccatctcccgcgacaattccaagaacacgctgtatctgcaaatgaacagcctgcgtgccgaggataccgcggtatattactgtgcgaaagcttttgcgggttttgactactggggtcagggaaccctggtcaccgtctcgagc

SEQ ID NO: 1877 - DNA, 348 bp, Homo sapiens
gaggtgcagctgttggagtctgggggaggcttggtacagcctggggggtccctgcgtctctcctgtgcagcctccggattcacctttcgggattatgagatggattgggtccgccaggctccagggaagggtctagagtgggtctcaagtattggtccgtctggttcggagacatactacgcagactccgtgaagggccggttcaccatctcccgcgacaattccaaggacacgctgtatctgcaaatgaacagcctgcgtgccgaggacaccgcggtatattactgtgcgaaatcgggtacggggtttgactactggggtcagggaaccctggtcaccgtctcgagc

SEQ ID NO: 1878 - DNA, 348 bp, Homo sapiens
gaggtgcagctgttggagtctgggggaggcttggtacagcctggggggtccctgcgtctctcctgtgcagcctccggattcacctttgcgcagtatgagatggattgggtccgccaggctccagggaagggtctagagtgggtctcatcgattagtcataatggtaggcatgcatactacgcagactccgtgaagggccggttcaccatctcccgcgacaattccaagaacacgctgtatctgcaaatgaacagcctgcgtgccgaggacaccgcggtatattactgtgcgaaatcgggggatgggtttgactactggggtcagggaaccctggtcaccgtctcgagc

SEQ ID NO: 1879 - DNA, 348 bp, Homo sapiens
gaggtgcagctgttggagtctgggggaggcttggtacagcctggggggtccctgcgtctctcctgtgcagcctccggattcacctttgagtggtttgagatggattgggtccgccaggctccagggaagggtctagagtgggtctcaactatttctatggggggtgataatacatactacgcagactccgtgaagggccggttcaccatctcccgcgacaattccaagaacacgctgtatctgcaaatgaacagcctgcgtgccgaggacaccgcggtatattactgtgcgaaagctgggtcggcgtttgactactggggtcagggaaccctggtcaccgtctcgagc

SEQ ID NO: 1880 - DNA, 348 bp, Homo sapiens
gaggtgcagctgttggagtctgggggaggcttggtacagcctggggggtccctgcgtctctcctgtgcagcctccggattcacctttatgaagtatgagatggattgggtccgccaggctccagggaagggtctagagtgggtctcaagtattagtagtagtggtgggtctacatactacgcagactccgtgaagggccggttcaccatctcccgcgacaattccaagaacacgctgtatctgcaaatgaacagcctgcgtgccgaggacaccgcggtatattactgtgcgaaatcttttacgccttttgactactggggtcagggaaccctggtcaccgtctcgagc

SEQ ID NO: 1881 - DNA, 348 bp, Homo sapiens
gaggtgcagctgttggagtctgggggaggcttggtacagcctggggggtccctgcgtctctcctgtgcagcctccggattcacctttggtcattatgagatggattgggtccgccaggctccagggaagggtctagagtgggtctcaactatttctccgaatggtattactacatactacgcagactccgtgaagggccggttcaccatctcccgcgacaattccaagaacacgctgtatctgcaaatgaacagcctgcgtgccgaggacaccgcggtatattactgtgcgaaagcttcgtctggttttgactactggggtcagggaaccctggtcaccgtctcgagc

SEQ ID NO: 1882 - DNA, 348 bp, Homo sapiens
gaggtgcagctgttggagtctgggggaggcttggtacagcctggggggtccctgcgtctctcctgtgcagcctccggattcacctttccttcttatgagatggattgggtccgccaggctccagggaagggtctagagtgggtctcaagtattagtccgactggtgatcgtacatactacgcagactccgtgaagggccggttcaccatctcccgcgacaattccaagaacacgctgtatctgcaaatgaacagcctgcgtgccgaggataccgcggtatattactgtgcgaaatctggtactagttttgactactggggtcagggaaccctggtcaccgtctcgagc

SEQ ID NO: 1883 - DNA, 348 bp, Homo sapiens
gaggtgcagctgttggagtctgggggaggcttggtacagcctggggggtccctgcgtctctcctgtgcagcctccggattcacctttcgggattatgagatggattgggtccgccaggctccagggaagggtctagagtgggtctcaactatttccccgtcgggtaggtcgacatactacgcagactccgtgaagggccggttcaccatctcccgcgacaattccaagaacacgctgtatctgcaaatgaacagcctgcgtgccgaggacaccgcagtatattactgtgcgaaagcttatactgggtttaggtactggggtcagggaaccctggtcaccgtctcgagc

SEQ ID NO: 1884 - DNA, 324 bp, Homo sapiens
gacatccagatgacccagtctccatcctccctgtctgcatctgtaggagaccgtgtcaccatcacttgccgggcaagtaaggcgattatgggggatttagcttggtaccagcagaaaccagggaaagcccctaagctcctgatcggtggtgggtccgtgttgcaaagtggggtcccatcacgtttcagtggcagtggatctgggacagatttcactctcaccatcagcagtctgcaacctgaagattttgctacgtactactgtcggcagggggcgatgggttcttatacgttcggccaagggaccaaggtggaaatcaaacgg

SEQ ID NO: 1885 - DNA, 324 bp, Homo sapiens
gacatccagatgacccagtctccatcctccctgtctgcatctgtaggagaccgtgtcaccatcacttgccgggcaagtcattttattgctcatggtttatcttggtaccagcagaaaccagggaaagcccctaagctcctgatcagtggggtgtccgtgttgcaaagtggggtcccatcacgtttcagtggcagtggatctgggacagatttcactctcaccatcagcagtctgcaacctgaagattttgctacgtactactgtcggcagggggcgatgggttcttatacgttcggccaagggaccaaggtggaaatcaaacgg

SEQ ID NO: 1886 - DNA, 324 bp, Homo sapiens
gacatccagatgacccagtctccatcctccctgtctgcatctgtaggagaccgtgtcaccatcacttgccgggcaagttctccgattactgatggtttagcttggtaccagcagaaaccagggaaagcccctaagctcctgatcgatactggttcccgtttgcaaagtggggtcccatcacgtttcagtggcagtggatctgggacagatttcactctcaccatcagcagtctgcaacctgaagattttgctacgtactactgtcggcagggggcgatgggttcttatacgttcggccaagggaccaaggtggaaatcaaacgg

SEQ ID NO: 1887 - DNA, 324 bp, Homo sapiens
gacatccagatgacccagtctccatcctccctgtctgcatctgtaggagaccgtgtcaccatcacttgccgggcaagtagtgttattcttaatgagttacattggtaccagcagaaaccagggaaagcccctaagctcctgatctcggctgtgtcccgtttgcaaagtggggtcccatcacgtttcagtggcagtggatctgggacagatttcactctcaccatcagcagtctgcaacctgaagattttgctacgtactactgtcttcagacgttttgggggccttttacgttcggccaagggaccaaggtggaaatcaaacgg

SEQ ID NO: 1888 - DNA, 324 bp, Homo sapiens
gacatccagatgacccagtctccatcctccctgtctgcatctgtaggagaccgtgtcaccatcacttgccgggcaagtcagcctattgagaataagttaaagtggtatcagcagaaaccagggaaagcccctaagctcctgatctataagacgtcctatttgcaaagtggggtcccatcacgtttcagtggcagtggatctgggacagatttcactctcaccatcagcagtctgcaacctgaagattttgctacgtactactgtcaacagaatcggcagaggcctcatacgttcggccaaggaaccaaggtggaaatcaaacgg

SEQ ID NO: 1889 - DNA, 324 bp, Homo sapiens
gacatccagatgacccagtctccatcctccctgtctgcatctgtaggagaccgtgtcaccatcacttgccgggcaagtcaggggattcagaataatttaaattggtaccagcagaaaccagggaaagcccctaagctcctgatctatcggacttccaatctgcaaagtggggtcccatcacgtttcagtggcagtggatctgggacagatttcactctcaccatcagcagtctgcaacctgaagattttgctgcgtactactgtcaacagacgtctgctaggccttatacgttcggccaagggaccagggtgaaaatcaaacgg

SEQ ID NO: 1890 - DNA, 324 bp, Homo sapiens
gacatccagatgacccagtctccatcctccctgtctgcatctgtaggagaccgtgtcaccatcacttgccgtgcaagttcggtgattgaggatacgttatcgtggtaccagcagaaaccagggaaagcccctaagctcctgatctctgggccgtccgggttgcaaagtggggtcccatcacgtttcagtggcagtggatctgggacagatttcactctcaccatcagcagtctgcaacctgaagattttgctacgtactactgtcggcagggggcgatgggttcttatacgttcggccaagggaccaaggtggaaatcaaacgg

SEQ ID NO: 1891 - DNA, 324 bp, Homo sapiens
gacatccagatgacccagtctccatcctccctgtctgcatctgtaggagaccgtgtcaccatcacttgccgggcaagtagggagattattgagcctttagtttggtaccagcagaaaccagggaaagcccctaagctcctgatcggggtgtcgtccgctttgcaaagtggggtcccatcacgtttcagtggcagtggatctgggacagatttcactctcaccatcagcggtctgcaacctgaagattttgctacgtactactgtcggcagggggcgatgggttcttatacgttcggccaagggaccaaggtggaaatcaaacgg

SEQ ID NO: 1892 - DNA, 324 bp, Homo sapiens
gacatccagatgacccagtctccatcctccctgtctgcatctgtaggagaccgtgtcaccatcacttgccgggcaagtttggtgattgattctgagttagcttggtaccagcagaaaccagggaaagcccctaagctcctgatcgggggtgtgtccgggttgcaaagtggggtcccatcacgtttcagtggcagtggatctgggacagatttcactctcaccatcagcagtctgcaacctgaagattttgctacgtactactgtcggcagggggcgatgggttcttatacgttcggccaagggaccaaggtggaaatcaaacgg

SEQ ID NO: 1893 - DNA, 324 bp, Homo sapiens
gacatccagatgacccagtctccatcctccctgtctgcatctgtaggagaccgtgtcaccatcacttgccgggcaagtatgatgattgataaggagttagcgtggtaccagcagaaaccagggaaagcccctaagctcctgatcgttggggggtccggtttgcaaagtggggtcccatcacgtttcagtggcagtggatctgggacagatttcactctcaccatcagcagtctgcaacctgaagattttgctacgtactactgtcggcagggggcgatgggttcttatacgttcggccaagggaccaaggtggaaatcaaacgg

SEQ ID NO: 1894 - DNA, 324 bp, Homo sapiens
gacatccagatgacccagtctccatcctccctgtctgcatctgtaggagaccgtgtcaccatcacttgccgggcaagtattccgattaatgagcagttagtgtggtaccagcagaaaccagggaaagcccctatgctcctgatcgggggggggtccaggttgcaaagtggggtcccatcacgtttcagtggcagtggatctgggacagatttcactctcaccatcagcagtctgcaacctgaagattttgctacgtactactgtcggcagggtgcggtggggtcttatacgttcggccaagggaccaaggtggaaatcaaacgg

SEQ ID NO: 1895 - DNA, 324 bp, Homo sapiens
gacatccagatgacccagtctccatcctccctgtctgcatctgtaggagaccgtgtcaccatcacttgccgggcaagtcagagcattagcagctatttaaattggtaccagcagaaaccagggaaagcccctaagctcctgatctatgctgcatccagtttgcaaagtggggtcccatcacgtttcagtggcagtggatctgggacagatttcactctcaccatcagcagtctgcaacctgaagattttgctacgtactactgtcaacagagttacagtacccctaatacgttcggccaagggaccaaggtggaaatcaaacgg

SEQ ID NO: 1896 - DNA, 324 bp, Homo sapiens
gacatccagatgacccagtctccatcctccctgtctgcatctgtaggagaccgtgtcaccatcacttgccgggcaagtaatcagattcgtgagccgttatcttggtaccagcagaaaccagggaaagcccctaagctcctgatcgggggtggttcccgtttgcaaagtggggtcccatcacgtttcagtggcagtggatctgggacagatttcactctcaccatcagcagtctgcaacctgaagattttgctacgtactactgtcggcagggggcgatgggttcttatacgttcggccaagggaccaaggtggaaatcaaacgg

SEQ ID NO: 1897 - DNA, 324 bp, Homo sapiens
gacatccagatgacccagtctccatcctccctgtctgcatctgtaggagaccgtgtcaccatcacttgccgggcaagtaaggttattgctgatgatttagtttggtaccagcagaaaccagggaaagcccctaagctcctgatcggttctctgtccggtttgcaaagtggggtcccatcacgtttcagtggcagtggatctgggacagatttcactctcaccatcagcagtctgcaacctgaagattttgctacgtactactgtcggcagggggcgatgggttcttatacgttcggccaagggaccaaggtggaaatcaaacgg

SEQ ID NO: 1898 - DNA, 324 bp, Homo sapiens; identical to SEQ ID NO: 1891

SEQ ID NO: 1899 - DNA, 324 bp, Homo sapiens; identical to SEQ ID NO: 1893

SEQ ID NO: 1900 - DNA, 324 bp, Homo sapiens
gacatccagatgacccagtctccatcctccctgtctgcatctgtaggagaccgtgtcaccatcacttgccgggcaagtactactattgatacggagttatcgtggtaccagcagaaaccagggaaagcccctaagctcctgatctctggttattccgtgttgcaaagtggggtcccatcacgtttcagtggcagtggatctgggacagatttcactctcaccatcagcagtctgcaacctgaagattttgctacgtactactgtcggcagggggcgatgggttcttatacgttcggccaagggaccaaggtggaaatcaaacgg

SEQ ID NO: 1901 - DNA, 324 bp, Homo sapiens
gacatccagatgacccagtctccatcctccctgtctgcatctgtaggagaccgtgtcaccatcacttgccgggcaagtagttggattgctgatgatttaagttggtaccagcagaaaccagggaaagcccctaagctcctgatcggtggtgtgtccgggttgcaaagtggggtcccatcacgtttcagtggcagtggatctgggacagatttcactctcaccatcagcagtctgcaacctgaagattttgctacgtactactgtcggcagggtctgctggggtcttatacgttcggccaagggaccaaggtggaaatcaaacgg

SEQ ID NO: 1902 - DNA, 324 bp, Homo sapiens
gacatccagatgacccagtctccatcctccctgtctgcatctgtaggagaccgtgtcaccatcacttgccgggcaagtaggaatattgatgagaatttagattggtaccagcagaaaccagggaaagcccctaagctcctgatccggtggggttcccgtttgcaaagtggggtcccatcacgtttcagtggcagtggatctgggacagatttcactctcaccatcagcagtctgcaacctgaagattttgctacgtactactgtcgtcagggtctgtttggttcttggacgttcggccaagggaccaaggtggaaatcaaacgg

SEQ ID NO: 1903 - DNA, 324 bp, Homo sapiens
gacatccagatgacccagtctccatcctccctgtctgcatctgtaggagaccgtgtcaccatcacttgccgggcaagtcggtcgattgagggtgagttattttggtaccagcagaaaccagggaaagcccctaagctcctgatcaggggtgcgtccgtgttgcaaagtggggtcccatcacgtttcagtggcagtggatctgggacagatttcactctcaccatcagcagtctgcaacctgaagattttgctacgtactactgtcggcaggggaggtatggttcttttacgttcggccaagggaccaaggtggaaatcaaacgg

SEQ ID NO: 1904 - DNA, 324 bp, Homo sapiens
gacatccagatgacccagtctccatcctccctgtctgcatctgtaggagaccgtgtcaccatcacttgccgggcaagtcaggcgattccgtgggggttaaattggtaccagcagaaaccagggaaagcccctaagctcctgatctatgatgtttccagtttgcaaagtggggtcccatcacgtttcagtggcagtggatctgggacagatttcactctcaccatcagcagtctgcaacctgaagattttgctacgtactactgtcaacaggatattcatattcctatgacgttcggccaagggaccaaggtggaaatcaaacgg

SEQ ID NO: 1905 - DNA, 324 bp, Homo sapiens
gacatccagatgacccagtctccatcctccctgtctgcatctgtaggagaccgtgtcaccatcacttgccgggcaagtcagcatattggtcgttggttatcttggtaccagcagaaaccagggaaagcccctaagctcctgatctatagggcgtccacgttgcaaagtggggtcccatcacgtttcagtggcagtggatctgggacagatttcactctcaccatcagcagtctgcaacctgaagattttgctacgtactactgtcaacaggattttggtgatccttatacgttcggccaagggaccaaggtgggaatcaaacgg

SEQ ID NO: 1906 - DNA, 324 bp, Homo sapiens
gacatccagatgacccagtctccatcctccctgtctgcatctgtaggagaccgtgtcaccatcacttgccgggcaagtcagaatatttttgctgatttaaattggtatcagcagaaaccagggaaagcccctaagctcctgatctatatggggtcccgtttgcaaagtggggtcccatcacgtttcagtggcagtggatctgggacagatttcactctcaccatcagcagtctgcaacctgaagattttgctacgtactactgtcaacaggattataagtttccacttacgttcggccaagggaccaaggtggaaatcaaacgg

SEQ ID NO: 1907 - DNA, 324 bp, Homo sapiens
gacatccagatgacccagtctccatcctccctgtctgcatctgtaggagaccgtgtcaccatcacttgccgggcaagttcggatattgggcgtatgttatcttggtaccagcagaaaccagggaaagcccctaagctcctgatcgttggtggttcctcgttgcaaagtggggtcccatcacgtttcagtggcagtggatctgggacagatttcactctcaccatcagtagtctgcaacctgaagattttgctacgtactactgttggcagtgggctaagccgcctacgacgttcggccaagggaccaaggtggaaatcaaacgg

SEQ ID NO: 1908 - DNA, 324 bp, Homo sapiens; identical to SEQ ID NO: 1887

SEQ ID NO: 1909 - DNA, 324 bp, Homo sapiens; identical to SEQ ID NO: 1906

SEQ ID NO: 1910 - DNA, 324 bp, Homo sapiens; identical to SEQ ID NO: 1888

SEQ ID NO: 1911 - DNA, 324 bp, Homo sapiens
gacatccagatgacccagtctccatcctccctgtctgcatctgtaggagaccgtgtcaccatcacttgccgggcaagtcctaatattgctgtggatttagcttggtaccagcagaaaccagggaaagcccctaagctcctgatcaggggggtttcccgtttgcaaagtggggtcccatcacgtttcagtggcagtggatctgggacagatttcactctcaccatcagcagtctgcaacctgaagattttgctacgtactactgtcggcagggggcgatgggttcttatacgttcggccaagggaccaaggtggaaatcaaacgg

SEQ ID NO: 1912 - DNA, 324 bp, Homo sapiens
gacatccagatgacccagtctccatcctccctgtctgcatctgtaggagaccgtgtcaccatcacttgccgggcaagtcagaatattgctaagaagttagcgtggtaccagcagaaaccagggaaagcccctaagctcctgatcgttggtgcgtccttgttgcaaagtggggtcccatcacgtttcagtggcagtggatctgggacagatttcactctcaccatcagcagtctgcaacctgaagattttgctacgtactactgtcggcagggggcgatgggttcttatacgttcggccaagggaccaaggtggaaatcaaacgg

SEQ ID NO: 1913 - DNA, 324 bp, Homo sapiens
gacatccagatgacccagtctccatcctccctgtctgcatctgtaggagaccgtgtcaccatcacttgccgggcaagtcaggatattgatatgtatttaaattggtatcagcagaaaccggggaaagcccctaagctcctgatctatcgtggttcccaattgcaaagtcgggtcccatcacgtttcagtggcagtggatctgggacagatttcactctcaccatcagcagtctgcaacctgaagatttagctacgtactactgtcaacagttggcgtcgtatcctgtgacgttcggccaagggaccaaggtggaaatcaaacgg

SEQ ID NO: 1914 - DNA, 324 bp, Homo sapiens
gacatccagatgacccagtctccatcctccctgtctgcatctgtaggagaccgtgtcaccatcacttgccgggcaagtcagagcattagcagctatttaaattggtaccagcagaaaccagggcaagcccctaagctcctgatcgcggctgcgtcctttttgcaaagtggggtcccatcacgtttcagtggcagtggatctgggacagatttcactctcaccatcagcagtctgcaacctgaagattttgctacgtactactgtgggcagggtgcgcggggtcctacgacgttcggccaagggaccagggtggaaatcaaacgg

SEQ ID NO: 1915 - DNA, 324 bp, Homo sapiens
gacatccagatgacccagtctccatcctccctgtctgcatctgtaggagaccgtgtcaccatcacttgccgggcaagtagtgttattcttaatgagttacattggtaccagcagaaaccagggaaagcccctaagctcctgatctcggctgtgtcccgtttgcaaagtggggtcccatcacgtttcagtggcagtggatctgggacagatttcactctcaccatcagcagtctgcaacctgaagattttgctacgtactactgtcttcagacgttttgggggccttatacgttcggccaagggaccaaggtggaaatcaaacgg

SEQ ID NO: 1916 - DNA, 21 bp, Artificial Sequence
  Primer
caggaaacagctatgaccatg

SEQ ID NO: 1917 - DNA, 20 bp, Artificial Sequence
  Primer
ttgtaaaacgacggccagtg

SEQ ID NO: 1918 - DNA, 348 bp, Homo sapiens
gaggtgcagctgttggagtctgggggaggcttggtacagcctggggggtccctgcgtctctcctgtgcagcctccggattcacctttgatagggaggagatggattgggtccgccaggctccagggaagggtctagagtgggtctcaactatttcgccgtcgggtaggaagacatactacgcagactccgtgaagggccggttcaccatctcccgcgacaattccaagaacacgctgtatctgcaaatgaacagcctgcgtgccgaggacaccgcggtatattactgtgcgaaagcttatactgggtttgactactggggtcagggaaccctggtcaccgtctcgagc

SEQ ID NO: 1919 - DNA, 348 bp, Homo sapiens
gaggtgcagctgttggagtctgggggaggcttggtacagcctggggggtccctgcgtctctcctgtgcagcctccggattcacctttcgggattatgagatggattgggtccgccaggctccagggaagggtctggagtgggtctcaacgatttctgctgatggtagggagacatactacgcagactccgtgaagggccggttcaccatctcacgcgacaattccaagaacacgctgtatctgcaaatgaacagcctgcgtgccgaggataccgcggtatattactgtgcgaaagcgtatacgtcgtttgactactggggtcagggaaccctggtcaccgtctcgagc

SEQ ID NO: 1920 - DNA, 348 bp, Homo sapiens
gaggtgcagctgttggagtctgggggaggcttggtacagcctggggggtccctgcgtctctcctgtgcagcctccggattcacctttaaggggagtgagatggattgggtccgccaggctccagggaagggtctggagtgggtctcaacgatttctgctgatggtagggagacatactacgcagactccgtgaagggccggttcaccatctcccgcgacaattccaagaacacgctgtatctgcaaatgaacagcctgcgtgccgaggataccgcggtatattactgtgcgaaagcgtatacgtcgtttgactactggggtcagggaaccctggtcaccgtctcgagc

SEQ ID NO: 1921 - DNA, 45 bp, Artificial Sequence
  Primer
  variation 22, 23, 28, 29: n = A,T,C or G
  misc_feature 22, 23, 28, 29: n = A,T,C or G
ctagagtgggtctcatctattnnsggtnnsggtggtagcacatac

SEQ ID NO: 1922 - DNA, 49 bp, Artificial Sequence
  Primer
  variation 22, 23, 31, 32: n = A,T,C or G
  misc_feature 22, 23, 31, 32: n = A,T,C or G
ctagagtgggtctcatctattnnsggtagtnnsggtagcacatactacg

SEQ ID NO: 1923 - DNA, 54 bp, Artificial Sequence
  Primer
  variation 22, 23, 37, 38: n = A,T,C or G
  misc_feature 22, 23, 37, 38: n = A,T,C or G
ctagagtgggtctcatctattnnsggtagtggtggtnnsacatactacgcagac

SEQ ID NO: 1924 - DNA, 58 bp, Artificial Sequence
  Primer
  misc_feature 22, 23, 43, 44: n = A,T,C or G
ctagagtgggtctcatctattnnsggtagtggtggtagcacannstacgcagactccg

SEQ ID NO: 1925 - DNA, 21 bp, Artificial Sequence
  Primer
aatagatgagacccactctag

SEQ ID NO: 1926 - DNA, 42 bp, Artificial Sequence
  Primer
  misc_feature 21, 22, 24, 25: n = A,T,C or G
gggtctcatctattagtggtnnsnnsggtagcacatactacg

SEQ ID NO: 1927 - DNA, 45 bp, Artificial Sequence
  Primer
  misc_feature 21, 22, 30, 31: n = A,T,C or G
gggtctcatctattagtggtnnsggtggtnnsacatactacgcag

SEQ ID NO: 1928 - DNA, 51 bp, Artificial Sequence
  Primer
  misc_feature 21, 22, 36, 37: n = A,T,C or G
gggtctcatctattagtggtnnsggtggtagcacannstacgcagactccg

SEQ ID NO: 1929 - DNA, 45 bp, Artificial Sequence
  Primer
  misc_feature 24, 25, 30, 31: n = A,T,C or G
gggtctcatctattagtggtagtnnsggtnnsacatactacgcag

SEQ ID NO: 1930 - DNA, 51 bp, Artificial Sequence
  Primer
  misc_feature 24, 25, 36, 37: n = A,T,C or G
gggtctcatctattagtggtagtnnsggtagcacannstacgcagactccg

SEQ ID NO: 1931 - DNA, 51 bp, Artificial Sequence
  Primer
  misc_feature 30, 31, 36, 37: n = A,T,C or G
gggtctcatctattagtggtagtggtggtnnsacannstacgcagactccg

SEQ ID NO: 1932 - DNA, 20 bp, Artificial Sequence
  Primer
accactaatagatgagaccc

SEQ ID NO: 1933 - DNA, 48 bp, Artificial Sequence
  Primer
  misc_feature 23, 24, 32, 33: n = A,T,C or G
atattactgtgcgaaagcttatnnsgggtttnnstactggggtcaggg

SEQ ID NO: 1934 - DNA, 48 bp, Artificial Sequence
  Primer
  misc_feature 23, 24, 26, 27: n = A,T,C or G
atattactgtgcgaaagcttatnnsnnstttgactactggggtcaggg

SEQ ID NO: 1935 - DNA, 48 bp, Artificial Sequence
  Primer
  misc_feature 26, 27, 32, 33: n = A,T,C or G
atattactgtgcgaaagcttatactnnstttnnstactggggtcaggg

SEQ ID NO: 1936 - DNA, 24 bp, Artificial Sequence
  Primer
ataagctttcgcacagtaatatac

SEQ ID NO: 1937 - DNA, 46 bp, Artificial Sequence
  Primer
  misc_feature 25, 26: n = A,T,C or G
gcagcctccggattcacctttgatnnsgaggagatggattgggtcc

SEQ ID NO: 1938 - DNA, 46 bp, Artificial Sequence
  Primer
  misc_feature 21, 22: n = A,T,C or G
ggacccaatccatctcctcsnnatcaaaggtgaatccggaggctgc

SEQ ID NO: 1939 - DNA, 43 bp, Artificial Sequence
  Primer
  misc_feature 20, 21, 26, 27: n = A,T,C or G
agagtgggtctcaactattnnsccgnnsggtaggaagacatac

SEQ ID NO: 1940 - DNA, 46 bp, Artificial Sequence
  Primer
  misc_feature 20, 21, 29, 30: n = A,T,C or G
agagtgggtctcaactattnnsccgtcgnnsaggaagacatactac

SEQ ID NO: 1941 - DNA, 50 bp, Artificial Sequence
  Primer
  misc_feature 20, 21, 35, 36: n = A,T,C or G
agagtgggtctcaactattnnsccgtcgggtaggnnsacatactacgcag

SEQ ID NO: 1942 - DNA, 56 bp, Artificial Sequence
  Primer
  misc_feature 20, 21, 41, 42: n = A,T,C or G
agagtgggtctcaactattnnsccgtcgggtaggaagacannstacgcagactccg

SEQ ID NO: 1943 - DNA, 21 bp, Artificial Sequence
  Primer
aatagttgagacccactctag

SEQ ID NO: 1944 - DNA, 51 bp, Artificial Sequence
  Primer
  misc_feature 21, 22, 24, 25: n = A,T,C or G
gggtctcaactatttcgccgnnsnnsaggaagacatactacgcagactccg

SEQ ID NO: 1945 - DNA, 51 bp, Artificial Sequence
  Primer
  misc_feature 21, 22, 30, 31: n = A,T,C or G
gggtctcaactatttcgccgnnsggtaggnnsacatactacgcagactccg

SEQ ID NO: 1946 - DNA, 51 bp, Artificial Sequence
  Primer
  misc_feature 21, 22, 36, 37: n = A,T,C or G
gggtctcaactatttcgccgnnsggtaggaagacannstacgcagactccg

SEQ ID NO: 1947 - DNA, 51 bp, Artificial Sequence
  Primer
  misc_feature 24, 25, 30, 31: n = A,T,C or G
gggtctcaactatttcgccgtcgnnsaggnnsacatactacgcagactccg

SEQ ID NO: 1948 - DNA, 51 bp, Artificial Sequence
  Primer
  misc_feature 24, 25, 36, 37: n = A,T,C or G
gggtctcaactatttcgccgtcgnnsaggaagacannstacgcagactccg

SEQ ID NO: 1949 - DNA, 51 bp, Artificial Sequence
  Primer
  misc_feature 30, 31, 36, 37: n = A,T,C or G
gggtctcaactatttcgccgtcgggtaggnnsacannstacgcagactccg

SEQ ID NO: 1950 - DNA, 20 bp, Artificial Sequence
  Primer
cggcgaaatagttgagaccc

SEQ ID NO: 1951 - DNA, 20 bp, Artificial Sequence
  Primer
ttcaggctgcgcaactgttg

SEQ ID NO: 1952 - DNA, 22 bp, Artificial Sequence
  Primer
cgccaagcttgcatgcaaattc

SEQ ID NO: 1953 - DNA, 48 bp, Artificial Sequence
  Primer
  misc_feature 23, 24, 32, 33: n = A,T,C or G
atattactgtgcgaaacatgggnnsggttttnnstactggggtcaggg

SEQ ID NO: 1954 - DNA, 44 bp, Artificial Sequence
  Primer
  misc_feature 23, 24, 26, 27: n = A,T,C or G
atattactgtgcgaaacatgggnnsnnstttgactactggggtc

SEQ ID NO: 1955 - DNA, 48 bp, Artificial Sequence
  Primer
  misc_feature 26, 27, 32, 33: n = A,T,C or G
atattactgtgcgaaacatgggactnnstttnnstactggggtcaggg

SEQ ID NO: 1956 - DNA, 24 bp, Artificial Sequence
  Primer
cccatgtttcgcacagtaatatac

SEQ ID NO: 1957 - DNA, 38 bp, Artificial Sequence
  Primer
  misc_feature 19, 20: n = A,T,C or G
gcctccggattcacctttnnsgattatgagatggattg

SEQ ID NO: 1958 - DNA, 38 bp, Artificial Sequence
  Primer
  misc_feature 19, 20: n = A,T,C or G
caatccatctcataatcsnnaaaggtgaatccggaggc

SEQ ID NO: 1959 - DNA, 46 bp, Artificial Sequence
  Primer
  misc_feature 20, 21, 26, 27: n = A,T,C or G
agagtgggtctcaagtattnnsccgnnsggttcggagacatactac

SEQ ID NO: 1960 - DNA, 50 bp, Artificial Sequence
  Primer
  misc_feature 20, 21, 29, 30: n = A,T,C or G
agagtgggtctcaagtattnnsccgtctnnstcggagacatactacgcag

SEQ ID NO: 1961 - DNA, 52 bp, Artificial Sequence
  Primer
  misc_feature 20, 21, 35, 36: n = A,T,C or G
agagtgggtctcaagtattnnsccgtctggttcgnnsacatactacgcagac

SEQ ID NO: 1962 - DNA, 55 bp, Artificial Sequence
  Primer
  misc_feature 20, 21, 41, 42: n = A,T,C or G
agagtgggtctcaagtattnnsccgtctggttcggagacannstacgcagactcc

SEQ ID NO: 1963 - DNA, 21 bp, Artificial Sequence
  Primer
aatacttgagacccactctag

SEQ ID NO: 1964 - DNA, 45 bp, Artificial Sequence
  Primer
  misc_feature 21, 22, 24, 25: n = A,T,C or G
gggtctcaagtattggtccgnnsnnstcggagacatactacgcag

SEQ ID NO: 1965 - DNA, 47 bp, Artificial Sequence
  Primer
  misc_feature 21, 22, 30, 31: n = A,T,C or G
gggtctcaagtattggtccgnnsggttcgnnsacatactacgcagac

SEQ ID NO: 1966 - DNA, 51 bp, Artificial Sequence
  Primer
  misc_feature 21, 22, 36, 37: n = A,T,C or G
gggtctcaagtattggtccgnnsggttcggagacannstacgcagactccg

SEQ ID NO: 1967 - DNA, 47 bp, Artificial Sequence
  Primer
  misc_feature 24, 25, 30, 31: n = A,T,C or G
gggtctcaagtattggtccgtctnnstcgnnsacatactacgcagac

SEQ ID NO: 1968 - DNA, 51 bp, Artificial Sequence
  Primer
  misc_feature 24, 25, 36, 37: n = A,T,C or G
gggtctcaagtattggtccgtctnnstcggagacannstacgcagactccg

SEQ ID NO: 1969 - DNA, 51 bp, Artificial Sequence
  Primer
  misc_feature 30, 31, 36, 37: n = A,T,C or G
gggtctcaagtattggtccgtctggttcgnnsacannstacgcagactccg

SEQ ID NO: 1970 - DNA, 20 bp, Artificial Sequence
  Primer
gggtctcaagtattggtccg

SEQ ID NO: 1971 - DNA, 48 bp, Artificial Sequence
  Primer
  misc_feature 23, 24, 32, 33: n = A,T,C or G
atattactgtgcgaaagcgtatnnstcgtttnnstactggggtcaggg

SEQ ID NO: 1972 - DNA, 44 bp, Artificial Sequence
  Primer
  misc_feature 23, 24, 26, 27: n = A,T,C or G
atattactgtgcgaaagcgtatnnsnnstttgactactggggtc

SEQ ID NO: 1973 - DNA, 48 bp, Artificial Sequence
  Primer
  misc_feature 26, 27, 32, 33: n = A,T,C or G
atattactgtgcgaaagcgtatacgnnstttnnstactggggtcaggg

SEQ ID NO: 1974 - DNA, 24 bp, Artificial Sequence
  Primer
atacgctttcgcacagtaatatac

SEQ ID NO: 1975 - DNA, 29 bp, Artificial Sequence
  Primer
ccaagaacacgctgtatctgcaaatgaac

SEQ ID NO: 1976 - DNA, 29 bp, Artificial Sequence
  Primer
gttcatttgcagatacagcgtgttcttgg

SEQ ID NO: 1977 - DNA, 34 bp, Artificial Sequence
  Primer
ccaagtcgacggaggtgcagctgttggagtctgg

SEQ ID NO: 1978 - DNA, 29 bp, Artificial Sequence
  Primer
ccaaccaagcggccgcgctcgagacggtg

SEQ ID NO: 1979 - DNA, 348 bp, Homo sapiens
gaggtgcagctgttggagtctgggggaggcttggtacagcctggggggtccctgcgtctctcctgtgcagcctccggattcacctttgattcttatgagatggattgggtccgccaggctccagggaagggtctagagtgggtctcaactatttcgccgtcgggtaggaagacatactacgcagactccgtgaagggccggttcaccatctcccgcgacaattccaagaacacgctgtatctgcaaatgaacagcctgcgtgccaaggacaccgcggtatattactgtgcgaaagctgggacttcttttgactactggggtcagggaaccctggtcaccgtctcgagc

SEQ ID NO: 1980 - DNA, 348 bp, Homo sapiens; identical to SEQ ID NO: 1920

SEQ ID NO: 1981 - DNA, 348 bp, Homo sapiens
gaggtgcagctgttggagtctgggggaggcttggtacagcctggggggtccctgcgtctctcctgtgcagcctccggattcacctttagttcgtatgagatggattgggtccgccgggctccagggaagggtctagagtgggtctcaacgatttctgctgatggtagggagacatactacgcagactccgtgaagggccggttcaccatctcccgcgacaattccaagaacacgctgtatctgcaaatgaacagcctgcgtgccggggacaccgcggtatattactgtgcgaaagcttttgatgcttttgaccactggggtcagggaaccctggtcaccgtctcaagc

SEQ ID NO: 1982 - DNA, 348 bp, Homo sapiens
gaggtgcagctgttggagtctgggggaggcttggtacagcctggggggtccctgcgtctctcctgtgcagcctccggattcacctttgagctgggggagatggattgggtccgccaggctccagggaagggtctagagtgggtctcatctattagtggtagtggtggtagcacatactacgcagactccgtgaagggccggttcaccatctcccgcgacaattccaagaacacgctgtatctgcaaatgaacagcctgcgtgccgaggacaccgcggtatattactgtgcgaaagcttatactgggtttgactactggggtcagggaaccctggtcaccgtctcgagc

SEQ ID NO: 1983 - DNA, 348 bp, Homo sapiens
gaggtgcagctgttggagtctgggggaggcttggtacagcctggggggtccctgcgtctctcctgtgcagcctccggattcacctttgagctggaggagatggattgggtccgccaggctccagggaagggtctagagtgggtctcatctattagtggtagtggtggtagcacatactacgcagactccgtgaagggccggttcaccacctcccgcgacaattccaagaacacgctgtatctgcaaatgaacagcctgcgtgccgaggacaccgcggtatattactgtgcgaaagcttatactgggtttgactactggggtcagggaaccctggtcaccgtctcgagc

SEQ ID NO: 1984 - DNA, 348 bp, Homo sapiens
gaggtgcagctgttggagtctgggggaggcttggtacagcctggggggtccctgcgtctctcctgtgcagcctccggattcacctttgatagggaggagatggattgggtccgccaggctccagggaagggtctagagtgggtctcaactatttcgccgtcgggtaggaagacatactacgcagactccgtgaagggccggttcaccatctcccgcgacaattccaagaacacgctgtatctgcaaatgaacagcctgcgtgccgaggacaccgcggtatattactgtgcgaaagcgtatgatccgtttgactactggggtcagggaaccctggtcaccgtctcgagc

SEQ ID NO: 1985 - DNA, 348 bp, Homo sapiens
gaggtgcagctgttggagtctgggggaggcttggtacagcctggggggtccctgcgtctctcctgtgcagcctccggattcacctttgatagggaggagatggattgggtccgccaggctccagggaagggtctagagtgggtctcaactatttcgccgtcgggtaggaagacatactacgcagactccgtgaagggccggttcaccatctcccgcgacaattccaagaacacgctgtatctgcaaatgaacagcctgcgtgccgaggacaccgcggtatattactgtgcgaaacaagggactggttttgactactggggtcagggaaccctggtcaccgtctcgagc

SEQ ID NO: 1986 - DNA, 348 bp, Homo sapiens
gaggtgcagctgttggagtctgggggaggcttggtacagcctggggggtccctgcgtctctcctgtgcagcctccggattcacctttcgggattatgagatggattgggtccgccaggctccagggaagggtctagagtgggtctcaagtattggtccgtctggttcggagacatactacgcagactccgtgaagggccggttcaccatctcccgcgacaattccacgaacacgctgtatctgcaaatgaacagcctgcgtgccgaggacaccgcggtatattactgtgcgaaatcgtatacttcttttgactactggggtcagggaaccctggtcaccgtctcgagc

SEQ ID NO: 1987 - DNA, 348 bp, Homo sapiens
gagttgcagctgttggagtctgggggaggcttggtacagcctggggggtccctgcgtctctcctgtgcagcctccggattcacctttcgggattatgagatggattgggtccgccaggctccagggaagggtctagagtgggtctcaagtattggtccgtctggttcggagacatactacgcagactccgtgaagggccggttcaccatctcccgcgacaattccaagaacacgctgtatctgcaaatgaacagcctgcgtgccgaggataccgcggtatattactgtgcgaaagcgtatacgtcgtttgactactggggtcagggaaccctggtcaccgtctcgagc

SEQ ID NO: 1988 - DNA, 348 bp, Homo sapiens
gaggtgcagctgttggagtctgggggaggcttggtacagcctggggggtccctgcgtctctcctgtgcagcctccggattcacctttagttcgtatgagatggattgggtccgccaggctccagggaagggtctagagtgggtctcaactatttcggcggatggtgttacgacatactacacagactccgtgaagggccggttcaccatctcccgcgacaattccaagaacacgctgtatctgcaaatgaacagcctgcgtgccgaggataccgcggtatattactgtgcgaaagcttttgatgcttttgactactggggtcagggaaccctggtcaccgtctcgagc

SEQ ID NO: 1989 - DNA, 348 bp, Homo sapiens
gaggtgcagctgttggagtctgggggaggcttggtacagcctggggggtccctgcgtctctcctgtgcagcctccggattcacctttgatagggaggagatggattgggtccgccaggctccagggaagggtctagagtgggtctcaactatttcgccgaggggtagggggacatactacgcagactccgtgaagggccggttcaccatctcccgcgacaattccaagaacacgctgtatctgcaaatgaacagcctgcgtgccgaggataccgcggtatattactgtgcgaaagcgtatacggggtttaggtactggggtcagggaaccctggtcaccgtctcgagc

SEQ ID NO: 1990 - DNA, 348 bp, Homo sapiens
gaggtgcagctgttggagtctgggggaggcttggtacagcctggggggtccctgcgtctctcctgtgcagcctccggattcacctttgatagggaggagatggattgggtccgccaggctccagggaagggtctagagtgggtctcaactatttcgccgttgggtaggtccacatactacgcagactccgtgaagggccggttcaccatctcccgcgacaattccaagaacacgctgtatctgcaaatgaacagcctgcgtgccgaggacaccgcggtatattactgtgcgaaagcttatactggctttcgctactggggtcagggaaccctggtcaccgtctcgagc

SEQ ID NO: 1991 - DNA, 348 bp, Homo sapiens
gaggtgcagctgttggagtctgggggaggcttggtacagcctggggggtccctgcgtctctcctgtgcagcctccggattcacctttcgggattatgagatggattgggtccgccaggctccagggaagggtctagagtgggtctcaagtattggtccgtctggttcggagacatactacgcagactccgtgaagggccggttcaccatctcccgcgacaattccaagaacacgctgtatctgcaaatgaacagcctgcgtgccgaggataccgcggtatattactgtgcgaaagcgtatacggggtttgggtactggggtcagggaaccctggtcaccgtctcgagc

SEQ ID NO: 1992 - DNA, 348 bp, Homo sapiens; identical to SEQ ID NO: 1849

SEQ ID NO: 1993 - DNA, 348 bp, Homo sapiens
gaggtgcagctgttggagtctgggggaggcttggtacagcctggggggtccctgcgtctctcctgtgcagcctccggattcacctttcgggattatgagatggattgggtccgccaggctccagggaagggtcgagagtgggtctcaagtattgggccggggggttcggagacatactacgcagactccgtgaagggccggttcaccatctcccgcgacaattccaagaacacgctgtatctgcaaatgaacagcctgcgtgccgaggataccgcggtatattactgtgcgaaagcgtatacggggtttaagtactggggtcagggaaccctggtcaccgtctcgagc

SEQ ID NO: 1994 - DNA, 348 bp, Homo sapiens
gaggtgcagctgttggagtctgggggaggcttggtacagcctggggggtccctgcgtctctcctgtgcagcctccggattcacctttcgggattatgagatggattgggtccgccaggctccagggaagggtctagagtgggtctcaactattcacccgtcgggtaggaagacatactacgcagactccgtgaagggccggttcaccatctcccgcgacaatttcaagaacacgctgtatctgcaaatgaacagcctgcgtgccgaggacaccgcggtatattactgtgcgaaagcttatactgggtttgggtactggggtcagggaaccctggtcaccgtctcgagc

SEQ ID NO: 1995 - DNA, 348 bp, Homo sapiens
gaggtgcagctgttggagtctgggggaggcttggtacagcctggggggtccctgcgtctctcctgtgcagcctccggattcacctttcgggattatgagatggattgggtccgccaggctccagggaagggtctagagtgggtctcaagtattagtccgaacggttcggagacaaactacgcagactccgtgaagggccggttcaccatctcccgcgacaattccaagaacacgctgtatctgcaaatgaacagcctgcgtgccgaggataccgcggtatattactgtgcgaaagcgtatacgtcgtttgactactggggtcagggaaccctggtcaccgtctcgagc

SEQ ID NO: 1996 - DNA, 348 bp, Homo sapiens
gaggtgcagctgttggagtctgggggaggcttggtacagcctggggggtccctgcgtctctcctgtgcagcctccggattcacctttcgggattatgagatggattgggtccgccaggctccagggaagggtcgagagtgggtctcaagtattgggccgtctggttcggagacatggtacgcagactccgtgaagggccggttcaccatctcccgcgacaattccaagaacacgctgtatctgcaaatgaacagcctgcgtgccgaggataccgcggtatattactgtgcgaaagcgtatacggggtttgggtactggggtcagggaaccctggtcaccgtctcaagc

SEQ ID NO: 1997 - DNA, 348 bp, Homo sapiens
gaggtgcagctgttggagtctgggggaggcttggtacagcctggggggtccctgcgtctctcctgtgcagcctccggattcacctttcgggattatgagatggattgggtccgccaggctccagggaagggtctagagtgggtctcaagtattgggccgtctggttcggagacatggtacgcagactccgtgaagggccggttcaccatctcccgcgacaattccaagaacacgctgtatctgcaaatgaacagcctgcgtgccgaggataccgcggtatattactgtgcgaaagcgtatacggggtttgggtactggggtcagggaaccctggtcaccgtctcgagc

SEQ ID NO: 1998 - DNA, 348 bp, Homo sapiens; identical to SEQ ID NO: 1851

SEQ ID NO: 1999 - DNA, 348 bp, Homo sapiens
gaggtgcagctgttggagtctgggggaggcttggtacagcctggggggtccctgcgtctctcctgtgcagcctccggattcacctttgatagggaggagatggattgggtccgccaggctccagggaagggtctagagtgggtctcaactatttcgccgggggggaggaagacatactacgcagactccgtgaagggccggttcaccatctcccgcgacaattccaagaacacgctgtatctgcaaatgaacagcctgcgtgccgaggacaccgcggtatattactgtgcgaaagcttatacggggtttaggtactggggtcagggaaccctggtcaccgtctcgagc

SEQ ID NO: 2000 - DNA, 348 bp, Homo sapiens; identical to SEQ ID NO: 1999

SEQ ID NO: 2001 - DNA, 348 bp, Homo sapiens
gaggtgcagctgttgcagtctgggggaggcttggtacagcctggggggtccctgcgtctctcctgtgcagcctccggattcacctttgatagggaggagatggattgggtccgccaggctccagggaagggtctagagtgggtctcaactatttcgccgaacggtaggacgacatactacgcagactccgtaaagggccggttcaccatctcccgcgacaattccaagaacacgctgtatctgcaaatgaacagcctgcgtgccgaggacaccgcggtatattactgtgcgaaagcttatacggggtttaggtactggggtcagggaaccctggtcaccgtctcgagc

SEQ ID NO: 2002 - DNA, 348 bp, Homo sapiens
gaggtgcagctgttggagtctgggggaggcttggtacagcctggggggtccctgcgtctctcctgtgcagcctccggattcacctttgatagggaggagatggattgggtccgccaggctccagggaagggtctagagtgggtctcaactatttcgccgaacggtaggaagacatactacgcagactccgtgaagggccggttcaccatctcccgcgacaattccaagaacacgctgtatctgcaaatgaacagcctgcgtgccgaggacaccgcggtatattactgtgcgaaagcttatactgggtttaggtactggggtcagggaaccctggtcaccgtctcgagc

SEQ ID NO: 2003 - DNA, 348 bp, Homo sapiens; identical to SEQ ID NO: 1850

SEQ ID NO: 2004 - DNA, 348 bp, Homo sapiens
gaggtgcagctgttggagtctgggggaggcttggtacagcctggggggtccctgcgtctctcctgtgcagcctccggattcacctttgatagggaggagatggattgggtccgccaggctccagggaagggtctagagtgggtctcaactatttcgccgtcggggaggaagacatggtacgcagactccgtgaagggccggttcaccatctcccgcgacaattccaagaacacgctgtatctgcaaatgaacagcctgcgtgccaaggacaccgcggtatattactgtgcgaaagcttatactggctttaggtactggggtcagggaaccctggtcaccgtctcgagc

SEQ ID NO: 2005 - DNA, 348 bp, Homo sapiens
gaggtgcagctgttggagtctgggggaggcttggtacagcctggggggtccctgcgtctctcctgtgcagcctccggattcacctttgatagggaggagatggattgggtccgccaggctccagggaagggtctagagtgggtctcaactatttcgccggccgggagggggacatactacgcagactccgtgaagggccggttcaccatctcccgcgacaattccaagaacacgctgtatctgcaaatgaacggcctgcgtgccgaggacaccgcggtatattactgtgcgaaagcttatactgggtttgggtactggggtcagggaaccctggtcaccgtctcgagc

SEQ ID NO: 2006 - DNA, 348 bp, Homo sapiens; identical to SEQ ID NO: 1989

SEQ ID NO: 2007 - DNA, 348 bp, Homo sapiens; identical to SEQ ID NO: 1850

SEQ ID NO: 2008 - DNA, 348 bp, Homo sapiens; identical to SEQ ID NO: 1883

SEQ ID NO: 2009 - DNA, 348 bp, Homo sapiens
gaggtgcagctgttggagtctgggggaggcttggtacagcctggggggtccatgcgtctctcctgtgcagcctccggattcacctttcgggattatgagatggattgggtccgccaggctccagggaagggtcgagagtgggtctcaagtattgggccgtctggttcggagacatggtacgcagactccgtgaagggccggttcaccatctcccgcgacaattccaagaacacgctgtatctgcaaatgaacagcctgcgtgccgaggataccgcggtatattactgtgcgaaagcttatactgggtttgggtactggggtcagggaaccctggtcaccgtctcgagc

SEQ ID NO: 2010 - DNA, 348 bp, Homo sapiens
gaggtgcagctgttggagtctgggggaggcttggtacagcctggggggtccctgcgtctctcctgtgcagcctccggattcacctttgatagggaggagatggattgggtccgccaggctccagggaagggtcgagagtgggtctcaactatttcgccgtcggggaggaagacatggtacgcagactccgtgaagggccggttcaccatctcccgcgacaattccaagaacacgctgtatctgcaaatgaacggcctgcgtgccgaggacaccgcggtatattactgtgcgaaagcttatactgggtttaggtactggggtcagggaaccctggtcaccgtctcgagc

SEQ ID NO: 2011 - DNA, 348 bp, Homo sapiens; identical to SEQ ID NO: 1852

SEQ ID NO: 2012 - DNA, 348 bp, Homo sapiens
gaggtgcagctgttggagtctgggggaggcttggtacagcctggggggtccctgcgtctctcctgtgcagcctccggattcacctttcgggattatgagatggattgggtccgccaggccccagggaagggtcgagagtgggtctcaagtattgggccgtctggttcggagacatggtacgcagactccgtgaagggccggttcaccatctcccgcgacaattccaagaacacgctgtatctgcaaatgaacagcctgcgtgccgaggataccgcggtatattactgtgcgaaagcgtatacggggtttgggtactggggtcagggaaccctggtcaccgtctcgagc

SEQ ID NO: 2013 - DNA, 348 bp, Homo sapiens
gaggtgcagctgttggagtctgggggaggcttggtacagcctggggggtccctgcgtctctcctgtgcagcctccggattcacctttcgggattatgagatggattgggtccgccaggctccagggaagggtctagagtgggtctcaactattagcccgtcgggtaggcggacatactacgcagactccgtgaagggccggttcaccatctcccgcgacaattccaagaacacgctgtatctgcaaatgaacagcctgcgtgccgaggataccgcggtatattactgtgcgaaagcgtatacggggtttcactactggggtcagggaaccctggtcaccgtctcgagc

SEQ ID NO: 2014 - DNA, 348 bp, Homo sapiens; identical to SEQ ID NO: 1852

SEQ ID NO: 2015 - DNA, 3998 bp, Artificial Sequence
  Vector
ggtgatgacggtgaaaacctctgacacatgcagctcccggagacggtcacagcttgtctgtaagcggatgccgggagcagacaagcccgtcagggcgcgtcagcgggtgttggcgggtgtcggggctggcttaactatgcggcatcagagcagattgtactgagagtgcaccatatatgcggtgtgaaataccgcacagatgcgtaaggagaaaataccgcatcaggcgccattcgccattcaggctgcgcaactgttgggaagggcgatcggtgcgggcctcttcgctattacgccagctggcgaaagggggatgtgctgcaaggcgattaagttgggtaacgccagggttttcccagtcacgacgttgtaaaacgacggccagtgccaagcttgcatgcaaggagatggcgcccaacagtcccccggccacggggcctgccaccatacccacgccgaaacaagcgctcatgagcccgaagtggcgagcccgatcttccccatcggtgatgtcggcgatataggcgccagcaaccgcacctgtggcgccggtgatgccggccacgatgcgtccggcgtagaggatcgagatccatagtagagtgcttctatcatagatcctccgtttcgtgatgagtatagtagagtgcttctatcatagatctcgatcccgcgaaattaatacgactcactatagggagaccacaacggtttccctctagaaataattttgtttaactttaagaaggagatataccatggggtcgaccggcggcgcggccgcaggatctggtggcggatcaggcggtggacatatgaaaggaatgagcaaaatgccgcagttcaatttgcggtggcctagagaagtattggatttggtacgcaaggtagcggaagagaatggtcggtctgttaattctgagatttatcagcgagtaatggaaagctttaagaaggaagggcgcattggcgccggtggcggatcaggcggtggatctggtggcggatcaggcggtggacatatgaaaggaatgagcaaaatgccgcagttcaatttgcggtggcctagagaagtattggatttggtacgcaaggtagcggaagagaatggtcggtctgttaattctgagatttatcagcgagtaatggaaagctttaagaaggaagggcgcattggcgccggtggcggatcaggcggtggatcctatccgtatgatgtgccggattatgcgtaactcgagagatccggtaacgatccggctgctaaaaagcccgaaaggaagctgagttggctgctgccaccgctgagcaataactagcataaccccttggggcctctaaacgggtcttgaggggttttttgctgaaaggaggaactatatccggatatccacaggacgggtgtggtcgccatgatcgcgtagtcgatagtggctccaagtagcgaagcgagcaggactgggcggcggccaaagcggtcggacagtgctccgagaacgggtgcgcatagaaattgcatcaacgcatatagcgctagcagcacgccatagtgactggcgatgctgtcggaatggacgatatcccgcaagaggcccggcagtaccggcataaccaagcctatgcctacagcatccagggtgacggtgccgaggatgacgatgagcgcattgttagatttcatacacggtgcctgactgcgttagcaatttaactgtgataaactaccgcattaaagcttatcgatgataagctgtcaaacatgagaattcgtaatcatggtcatagctgtttcctgtgtgaaattgttatccgctcacaattccacacaacatacgagccggaagcataaagtgtaaagcctggggtgcctaatgagtgagctaactcacattaattgcgttgcgctcactgcccgctttccagtcgggaaacctgtcgtgccagctgcattaatgaatcggccaacgcgcggggagaggcggtttgcgtattgggcgctcttccgcttcctcgctcactgactcgctgcgctcggtcgttcggctgcggcgagcggtatcagctcactcaaaggcggtaatacggttatccacagaatcaggggataacgcaggaaagaacatgtgagcaaaaggccagcaaaaggccaggaaccgtaaaaaggccgcgttgctggcgtttttccataggctccgcccccctgacgagcatcacaaaaatcgacgctcaagtcagaggtggcgaaacccgacaggactataaagataccaggcgtttccccctggaagctccctcgtgcgctctcctgttccgaccctgccgcttaccggatacctgtccgcctttctcccttcgggaagcgtggcgctttctcatagctcacgctgtaggtatctcagttcggtgtaggtcgttcgctccaagctgggctgtgtgcacgaaccccccgttcagcccgaccgctgcgccttatccggtaactatcgtcttgagtccaacccggtaagacacgacttatcgccactggcagcagccactggtaacaggattagcagagcgaggtatgtaggcggtgctacagagttcttgaagtggtggcctaactacggctacactagaaggacagtatttggtatctgcgctctgctgaagccagttaccttcggaaaaagagttggtagctcttgatccggcaaacaaaccaccgctggtagcggtggtttttttgtttgcaagcagcagattacgcgcagaaaaaaaggatctcaagaagatcctttgatcttttctacggggtctgacgctcagtggaacgaaaactcacgttaagggattttggtcatgagattatcaaaaaggatcttcacctagatccttttaaattaaaaatgaagttttaaatcaatctaaagtatatatgagtaaacttggtctgacagttaccaatgcttaatcagtgaggcacctatctcagcgatctgtctatttcgttcatccatagttgcctgactccccgtcgtgtagataactacgatacgggagggcttaccatctggccccagtgctgcaatgataccgcgagacccacgctcaccggctccagatttatcagcaataaaccagccagccggaagggccgagcgcagaagtggtcctgcaactttatccgcctccatccagtctattaattgttgccgggaagctagagtaagtagttcgccagttaatagtttgcgcaacgttgttgccattgctacaggcatcgtggtgtcacgctcgtcgtttggtatggcttcattcagctccggttcccaacgatcaaggcgagttacatgatcccccatgttgtgcaaaaaagcggttagctccttcggtcctccgatcgttgtcagaagtaagttggccgcagtgttatcactcatggttatggcagcactgcataattctcttactgtcatgccatccgtaagatgcttttctgtgactggtgagtactcaaccaagtcattctgagaatagtgtatgcggcgaccgagttgctcttgcccggcgtcaatacgggataataccgcgccacatagcagaactttaaaagtgctcatcattggaaaacgttcttcggggcgaaaactctcaaggatcttaccgctgttgagatccagttcgatgtaacccactcgtgcacccaactgatcttcagcatcttttactttcaccagcgtttctgggtgagcaaaaacaggaaggcaaaatgccgcaaaaaagggaataagggcgacacggaaatgttgaatactcatactcttcctttttcaatattattgaagcatttatcagggttattgtctcatgagcggatacatatttgaatgtatttagaaaaataaacaaataggggttccgcgcacatttccccgaaaagtgccacctgacgtctaagaaaccattattatcatgacattaacctataaaaataggcgtatcacgaggccctttcg

SEQ ID NO: 2016 - DNA, 324 bp, Homo sapiens; identical to SEQ ID NO: 1887

SEQ ID NO: 2017 - DNA, 354 bp, Homo sapiens
gaggtgcagctgttggagtctgggggaggcttggtacagcctggggggtccctgcgtctctcctgtgcagcctccggattcatctttgcttggtatgatatggggtgggcccgccaggctccagggaagggtctagagtgggtctcaagtattgattggaggggtgatcagacatactacgcagactccgtgaagggccggttcaccatctcccgcgacaattccaagaacacgctgtatctgcaaatgaacagcctgcgtgccgaggacaccgcggtatattactgtgcgacagcggaggacgagccggggtatgactactggggtcagggaaccctggtcaccgtctcgagc

SEQ ID NO: 2018 - DNA, 354 bp, Homo sapiens
gaggtgcagctgttggagtctgggggaggcttggtacagcctggggggtccctgcgtctctcctgtgcagcctccggattcatctttgcttggtatgatatggggtgggcccgccaggctccagggaagggtctagagtgggtctcaagtattgattggaagggtggtaagacatactacgcagactccgtgaagggccggttcaccatctcccgcgacaattccaagaacacgctgtatctgcaaatgaacagcctgcgtgccgaggacaccgcggtatattactgtgcgacagcggaggacgagccggggtatgactactggggtcagggaaccctggtcaccgtctcgagc

SEQ ID NO: 2019 - DNA, 354 bp, Homo sapiens
ggggtgcagctgttggagtctgggggaggcttggtacagcctggggggtccctgcgtctctcctgtgcagcctccggattcatctttgcttggtatgatatggggtgggtccgccaggctccagggaagggtctagagtgggtctcaagtattgattggcatggtgaggttgaatactacgcagactccgtgaagggccggttcaccatctcccgcgacaattccaagaacacgctgtatctgcaaatgaacagcctgcgtgccgaggacaccgcggtatattactgtgcgacagcggaggacgagccggggtatgactactggggtcagggaaccctggtcaccgtctcgagc

SEQ ID NO: 2020 - DNA, 354 bp, Homo sapiens
gaggtgcagctgttggagtctgggggaggcttggtacagcctggggggtccctgcgtctctcctgtgcagcctccggattcatctttgcttggtatgatatggggtgggtccgccaggctccagggaagggtctagagtgggtctcaagtattgattggcatggtaagattacatactacgcagactccgtgaagggccggttcaccatctcccgcgacaattccaagaacacgctgtatctgcaaatgaacagcctgcgtgccgaggacaccgcggtatattactgtgcgacagcggaggacgagccggggtatgactactggggtcagggaaccctggtcaccgtctcgagc

SEQ ID NO: 2021 - DNA, 354 bp, Homo sapiens
gaggtgcagctgttggagtctgggggaggcttggtacagcctggggggtccctgcgtctctcctgtgcagcctccggattcatctttgcttggtatgatatggggtgggtccgccaggctccagggaagggtctagagtgggtctcaagtattgattggaagggtatggagacatactacgcagactccgtgaagggccggttcaccatctcccgcgacaattccaagaacacgctgtatctgcaaatgaacagcctgcgtgccgaggacaccgcggtatattactgtgcgacagcggaggacgagccggggtatgactactggggtcagggaaccctggtcaccgtctcgagc

SEQ ID NO: 2022 - DNA, 354 bp, Homo sapiens
gaggtgcagctgttggagtctgggggaggcttggtacagcctggggggtccctgcgtctctcctgtgcagcctccggattcgcgtttgctgcgtatgatatggggtgggtccgccaggctccagggaagggtctagagtgggtctcaagtattgattggaagggtatggagacatactacgcagactccgtgaagggccggttcaccatctcccgcgacaattccaagaacacgctgtatctgcaaatgaacagcctgcgtgccgaggacaccgcggtatattactgtgcgacagcggaggacgagccggggtatgactactggggtcagggaaccctggtcaccgtctcgagc

SEQ ID NO: 2023 - DNA, 354 bp, Homo sapiens
ggggtgcagctgttggagtctgggggaggcttggtacagcctggggggtccctgcgtctctcctgtgcagcctccggattcatctttgctgtgtatgatatggggtgggcccgccaggctccagggaagggtctagagtgggtctcaagtattaatgatggtggtaatgttacatactacgcagactccgtgaagggccggttcaccatctcccgcgacaattccaagaacacgctgtatctgcaaatgaacagcctgcgtgccgaggacaccgcggtatattactgtgcgacagcggaggacgagccggggtatgactactggggtcagggaaccctggtcaccgtctcgagc

SEQ ID NO: 2024 - DNA, 354 bp, Homo sapiens
ggggtgcagctgttggagtctgggggaggcttggtacagcctggggggtccctgcgtctctcctgtgcagcctccggattcatctttgctgtgtatgatatggggtgggcccgccaggctccagggaagggtctagagtgggtctcaagtattaatgatggtggtaatgttacatactacgcagactccgtgaagggccggttcaccatctcccgcgacaattccaagaacacgctgtatctgcaaatgaacagcctgcgtgccgaggacaccgcggtatattactgtgcgacagcggaggacgagccggggtatgactaccggggtcagggaaccctggtcaccgtctcgagc

SEQ ID NO: 2025 - DNA, 354 bp, Homo sapiens
gaggtgcagctgttggagtctgggggaggcttgatacagcctggggggtccctgcgtctctcctgtgcagcctccggattcatctttgctgtgtatgatatggggtgggcccgccaggctccagggaagggtctagagtgggtctcaagtattaatgatggtggtaatgttacatactacgcagactccgtgaagggccggttcaccatctcccgcgacaattccaagaacacgctgtatctgcaaatgaacagcctgcgtgccgaggacaccgcggtatattactgtgcgacagcggaggacgagccggggtatgactaccggggtcagggaaccctggtcaccgtctcgagc

SEQ ID NO: 2026 - DNA, 354 bp, Homo sapiens
ggggtgcagctgttggagtctgggggaggcttggtacagcctggggggtccctgcgtctctcctgtgcagcctccggattcatctttgcttggtatgatatgatgtgggcccgccaggctccagggaagggtctagagtgggtctcaagtattaatgatggtggtaatgttacatactacgcagactccgtgaagggccggttcaccatctcccgcgacaattccaagaacacgctgtatctgcaaatgaacagcctgcgtgccgaggacaccgcggtatattactgtgcgacagcggaggacgagccggggtatgactactggggtcagggaaccctggtcaccgtctcgagc

SEQ ID NO: 2027 - DNA, 354 bp, Homo sapiens
ggggtgcagctgttggagtctgggggaggcttggtacagcctggggggtccctgcgtctctcctgtgcagcctccggattcatctttgcttggtatgatatggggtgggtccgccaggctccagggaagggtctagagtgggtctcaagtattaacgaccatggtaagattacatactacgcagactccgtgaagggccggttcaccatctcccgcgacaattccaagaacacgctgtatctgcaaatgaacagcctgcgtgccgaggacaccgcggtatattactgtgcgacagcggaggacgagccggggtatgactactggggtcagggaaccctggtcaccgtctcgagc

SEQ ID NO: 2028 - DNA, 354 bp, Homo sapiens
ggggtgcagctgttggagtctgggggaggcttggtacagcctggggggtccctgcgtctctcctgtgcagcctccggattcatctttgcttggtatgatatggggtgggtccgccaggctccagggaagggtctagagtgggtctcaagtattaacgacacgggtaatgttacatactacgcagactccgtgaagggccggttcaccatctcccgcgacaattccaagaacacgctgtatctgcaaatgaacagcctgcgtgccgaggacaccgcggtatattactgtgcgacagcggaggacgagccggggtatgactactggggtcagggaaccctggtcaccgtctcgagc

SEQ ID NO: 2029 - DNA, 354 bp, Homo sapiens
ggggtgcagctgttggagtctgggggaggcttggtacagcctggggggtccctgcgtctctcctgtgcagcctccggattcatctttgcttggtatgatatggggtgggtccgccaggctccagggaagggtctagagtgggtctcaagtattaacgacaagggtggtaagacatactacgcagactccgtgaagggccggttcaccatctcccgcgacaattccaagaacacgctgtatctgcaaatgaacagcctgcgtgccgaggacaccgcggtatattactgtgcgacagcggaggacgagccggggtatgactactggggtcagggaaccctggtcaccgtctcgagc

SEQ ID NO: 2030 - DNA, 354 bp, Homo sapiens
ggggtgcagctgttggagtctgggggaggcttggtacagcctggggggtccctgcgtctctcctgtgcagcctccggattcatctttgcttggtatgatatggggtgggcccgccaggctccagggaagggtctagagtgggtctcaagtattgattggaagggtggtaagacatactacgcagactccgtgaagggccggttcaccatctcccgcgacaattccaagaacacgctgtatctgcaaatgaacagcctgcgtgccgaggacaccgcggtatattactgtgcgacagcggaggacgagccggggtttgactactggggtcagggaaccctggtcaccgtctcgagc

SEQ ID NO: 2031 - DNA, 354 bp, Homo sapiens
ggggtgcagctgttggagtctgggggaggcttggtacagcctggggggtccctgcgtctctcctgtgcagcctccggattcatctttgctgtgtatgatatggggtgggcccgccaggctccagggaagggtctagagtgggtctcaagtattgattggaagggtatggagacatactacgcagactccgtgaagggccggttcaccatctcccgcgacaattccaagaacacgctgtatctgcaaatgaacagcctgcgtgccgaggacaccgcggtatattactgtgcgacagcggaggacgagccggggtatgactactggggtcagggaaccctggtcaccgtctcgagc

SEQ ID NO: 2032 - DNA, 354 bp, Homo sapiens
ggggtgcagctgttggagtctgggggaggcttggtacagcctggggggtccctgcgtctctcctgtgcagcctccggattcatctttgcttggtatgatatggggtgggtccgccaggctccagggaagggtctagagtgggtctcaagtattaacgacaagggtatggagacatactacgcagactccgtgaagggccggttcaccatctcccgcgacaattccaagaacacgctgtatctgcaaatgaacagcctgcgtgccgaggacaccgcggtatattactgtgcgacagcggaggacgagccggggtatgactactggggtcagggaaccctggtcaccgtctcgagc

SEQ ID NO: 2033 - DNA, 354 bp, Homo sapiens
ggggtgcagctgttggagtctgggggaggcttggtacagcctggggggtccctgcgtctctcctgtgcagcctccggattcatctttgcttggtatgatatggggtgggtccgccaggctccagggaagggtctagagtgggtctcaagtattaacgacaggggtgatcagacatactacgcagactccgtgaagggccggttcaccatctcccgcgacaattccaagaacacgctgtatctgcaaatgaacagcctgcgtgccgaggacaccgcggtatattactgtgcgacagcggaggacgagccggggtatgactactggggtcagggaaccctggtcaccgtctcgagc

SEQ ID NO: 2034 - DNA, 354 bp, Homo sapiens
ggggtgcagctgttggagtctgggggaggcttggtacagcctggggggtccctgcgtctctcctgtgcagcctccggattcatctttgcttggtatgatatggggtgggtccgccaggctccagggaagggtctagagtgggtctcaagtattaacgaccagggtaatactacatactacgcagactccgtgaagggccggttcaccatctcccgcgacaattccaagaacacgctgtatctgcaaatgaacagcctgcgtgccgaggacaccgcggtatattactgtgcgacagcggaggacgagccggggtatgactactggggtcagggaaccctggtcaccgtctcgagc

SEQ ID NO: 2035 - DNA, 354 bp, Homo sapiens
ggggtgcagctgttggagtctgggggaggcttggtacagcctggggggtccctgcgtctctcctgtgcagcctccggattcatctttgctgcgtatgctatggggtgggtccgccaggctccagggaagggtctagagtgggtctcaagtattgattggaagggtatggagacatactacgcagactccgtgaagggccggttcaccatctcccgcgacaattccaagaacacgctgtatctgcaaatgaacagcctgcgtgccgaggacaccgcggtatattactgtgcgacagcggaggacgagccggggtatgactactggggtcagggaaccctggtcaccgtctcgagc

SEQ ID NO: 2036 - DNA, 354 bp, Homo sapiens
ggggtgcagctgttggagtctgggggaggcttggtacagcctggggggtccctgcgtctctcctgtgcagcctccggattcatctttgctgcgtatgctatggcgtgggtccgccaggctccagggaagggtctagagtgggtctcaagtattgattggaagggtatggagacatactacgcagactccgtgaagggccggttcaccatctcccgcgacaattccaagaacacgctgtatctgcaaatgaacagcctgcgtgccgaggacaccgcggtatattactgtgcgacagcggaggacgagccggggtatgactactggggtcagggaaccctggtcaccgtctcgagc

SEQ ID NO: 2037 - DNA, 354 bp, Homo sapiens
ggggtgcagctgttggagtctgggggaggcttggtacagcctggggggtccctgcgtctctcctgtgcagcctccggattcatctttgcttggtatgatatggggtgggtccgccaggctccagggaagggtctagagtgggtctcaagtattgatgcagcgggtgcggagacatactacgcagactccgtgaagggccggttcaccatctcccgcgacaattccaagaacacgctgtatctgcaaatgaacagcctgcgtgccgaggacaccgcggtatattactgtgcgacagcggaggacgagccggggtatgactactggggtcagggaaccctggtcaccgtctcgagc

SEQ ID NO: 2038 - DNA, 354 bp, Homo sapiens
ggggtgcagctgttggagtctgggggaggcttggtacagcctggggggtccctgcgtctctcctgtgcagcctccggattcatctttgcttggtatgatatggggtgggtccgccaggctccagggaagggtctagagtgggtctcaagtattgattgggcgggtgctgcgacatactacgcagactccgtgaagggccggttcaccatctcccgcgacaattccaagaacacgctgtatctgcaaatgaacagcctgcgtgccgaggacaccgcggtatattactgtgcgacagcggaggacgagccggggtatgactactggggtcagggaaccctggtcaccgtctcgagc

SEQ ID NO: 2039 - DNA, 354 bp, Homo sapiens
ggggtgcagctgttggagtctgggggaggcttggtacagcctggggggtccctgcgtctctcctgtgcagcctccggattcatctttgcttggtatgatatggggtgggtccgccaggctccagggaagggtctagagtgggtctcaagtattgattggaagggtatggagacatactacgcagactccgtgaagggccggttcaccatctcccgcgacaattccaagaacacgctgtatctgcaaatgaacagcctgcgtgccgaggacaccgcggtatattactgtgcgacagcggctgcagagccggggtatgactactggggtcagggaaccctggtcaccgtctcgagc

SEQ ID NO: 2040 - DNA, 354 bp, Homo sapiens
ggggtgcagctgttggagtctgggggaggcttggtacagcctggggggtccctgcgtctctcctgtgcagcctccggattcatctttgcttggtatgatatggggtgggtccgccaggctccagggaagggtctagagtgggtctcaagtattgattggaagggtatggagacatactacgcagactccgtgaagggccggttcaccatctcccgcgacaattccaagaacacgctgtatctgcaaatgaacagcctgcgtgccgaggacaccgcggtatattactgtgcgacagcggctgcagcgccggggtatgactactggggtcagggaaccctggtcaccgtctcgagc

SEQ ID NO: 2041 - DNA, 354 bp, Homo sapiens
ggggtgcagctgttggagtctgggggaggcttggtacagcctggggggtccctgcgtctctcctgtgcagcctccggattcatctttgcttggtatgatatggggtgggtccgccaggctccagggaagggtctagagtgggtctcaagtattgattggaagggtatggagacatactacgcagactccgtgaagggccggttcaccatctcccgcgacaattccaagaacacgctgtatctgcaaatgaacagcctgcgtgccgaggacaccgcggtatattactgtgcgacagcggaggcagcggcggggtatgactactggggtcagggaaccctggtcaccgtctcgagc

SEQ ID NO: 2042 - DNA, 354 bp, Homo sapiens
ggggtgcagctgttggagtctgggggaggcttggtacagcctggggggtccctgcgtctctcctgtgcagcctccggattcatctttgcttggtatgatatggggtgggtccgccaggctccagggaagggtctagagtgggtctcaagtattgattggaagggtatggagacatactacgcagactccgtgaagggccggttcaccatctcccgcgacaattccaagaacacgctgtatctgcaaatgaacagcctgcgtgccgaggacaccgcggtatattactgtgcgacagcggaggacgcggcggcttatgactactggggtcagggaaccctggtcaccgtctcgagc

SEQ ID NO: 2043 - DNA, 354 bp, Homo sapiens
ggggtgcagctgttggagtctgggggaggcttggtacagcctggggggtccctgcgtctctcctgtgcagcctccggagcagccgccgcttggtatgatatggggtgggtccgccaggctccagggaagggtctagagtgggtctcaagtattgattggaagggtatggagacatactacgcagactccgtgaagggccggttcaccatctcccgcgacaattccaagaacacgctgtatctgcaaatgaacagcctgcgtgccgaggacaccgcggtatattactgtgcgacagcggaggacgagccggggtatgactactggggtcagggaaccctggtcaccgcctcgagc

SEQ ID NO: 2044 - DNA, 354 bp, Homo sapiens
ggggtgcagctgttggagtctgggggaggcttggtacagcctggggggtccctgcgtctctcctgtgcagcctccggattcgcgtttgctgcgtatgatatggggtgggtccgccaggctccagggaagggtctagagtgggtctcaagtattgattggaagggtatggagacatactacgcagactccgtgaagggccggttcaccatctcccgcgacaattccaagaacacgctgtatctgcaaatgaacagcctgcgtgccgaggacaccgcggtatattactgtgcgacagcggaggacgagccggggtatgactactggggtcagggaaccctggtcaccgtctcgagc

SEQ ID NO: 2045 - DNA, 354 bp, Homo sapiens
ggggtgcagctgttggagtctgggggaggcttggtacagcctggggggtccctgcgtctctcctgtgcagcctccggattcatctttgcttggtatgatatggggtgggtccgccaggctccagggaagggtctagagtgggtctcagctattgctgcgaagggtatggagacatactacgcagactccgtgaagggccggttcaccatctcccgcgacaattccaagaacacgctgtatctgcaaatgaacagcctgcgtgccgaggacaccgcggtatattactgtgcgacagcggaggacgagccggggtatgactactggggtcagggaaccctggtcaccgtctcgagc

SEQ ID NO: 2046 - DNA, 354 bp, Homo sapiens
ggggtgcagctgttggagtctgggggaggcttggtacagcctggggggtccctgcgtctctcctgtgcagcctccggattcatctttgcttggtatgatatggggtgggtccgccaggctccagggaagggtctagagtgggtctcaagtattgctgcagcgggtatggagacatactacgcagactccgtgaagggccggttcaccatctcccgcgacaattccaagaacacgctgtatctgcaaatgaacagcctgcgtgccgaggacaccgcggtatattactgtgcgacagcggaggacgagccggggtatgactactggggtcagggaaccctggtcaccgtctcgagc

SEQ ID NO: 2047 - DNA, 354 bp, Homo sapiens
ggggtgcagctgttggagtctgggggaggcttggtacagcctggggggtccctgcgtctctcctgtgcagcctccggattcatctttgcttggtatgatatggggtgggtccgccaggctccagggaagggtctagagtgggtctcaagtattaatgatggtggtgaggttacatactacgcagactccgtgaagggccggttcaccatctcccgcgacaattccaagaacacgctgtatctgcaaatgaacagcctgcgtgccgaggacaccgcggtatattactgtgcgacagcggaggacgagccggggtatgactactggggtcagggaaccctggtcaccgtctcgagc

SEQ ID NO: 2048 - DNA, 354 bp, Homo sapiens
ggggtgcagctgttggagtctgggggaggcttggtacagcctggggggtccctgcgtctctcctgtgcagcctccggattcatctttgcttggtatgatatggggtgggtccgccaggctccagggaagggtctagagtgggtctcaagtattgattggaggggtgatcagacatactacgcagactccgtgaagggccggttcaccatctcccgcgacaattccaagaacacgctgtatctgcaaatgaacagcctgcgtgccgaggacaccgcggtatattactgtgcgacagcggaggacgagccggggtatgactactggggtcagggaaccctggtcaccgtctcgagc

SEQ ID NO: 2049 - DNA, 354 bp, Homo sapiens
ggggtgcagctgttggagtctgggggaggcttggtacagcctggggggtccctgcgtctctcctgtgcagcctccggattcatctttgcttggtatgatatggggtgggtccgccaggctccagggaagggtctagagtgggtctcaagtattaatgatcgtggtgaggttacatactacgcagactccgtgaagggccggttcaccatctcccgcgacaattccaagaacacgctgtatctgcaaatgaacagcctgcgtgccgaggacaccgcggtatattactgtgcgacagcggaggacgagccggggtatgactactggggtcagggaaccctggtcaccgtctcgagc

SEQ ID NO: 2050 - DNA, 354 bp, Homo sapiens
ggggtgcagctgttggagtctgggggaggcttggtacagcctggggggtccctgcgtctctcctgtgcagcctccggattcatctttgcttggtatgatatgaagtgggcccgccaggctccagggaagggtctagagtgggtctcaagtattgattggcatggtaatgttacatactacgcagactccgtgaagggccggttcaccatctcccgcgacaattccaagaacacgctgtatctgcaaatgaacagcctgcgtgccgaggacaccgcggtatattactgtgcgacagcggaggacgagccggggtatgactactggggtcagggaaccctggtcaccgtctcgagc

SEQ ID NO: 2051 - DNA, 354 bp, Homo sapiens
ggggtgcagctgttggagtctgggggaggcttggtacagcctggggggtccctgcgtctctcctgtgcagcctccggattcatctttgcttggtatgatatggggtgggtccgccaggctccagggaagggtctagagtgggtctcaagtattaatgatggtggtaatgttaagtactacgcagactccgtgaagggccggttcaccatctcccgcgacaattccaagaacacgctgtatctgcaaatgaacagcctgcgtgccgaggacaccgcggtatattactgtgcgacagcggaggacgagccggggtatgactactggggtcagggaaccctggtcaccgtctcgagc

SEQ ID NO: 2052 - DNA, 354 bp, Homo sapiens
ggggtgcagctgttggagtctgggggaggcttggtacagcctggggggtccctgcgtctctcctgtgcagcctccggattcatctttgcttggtatgatatggggtgggtccgccaggctccagggaagggtctagagtgggtctcaagtattaatgatggtggtaatgttatttactacgcagactccgtgaagggccggttcaccatctcccgcgacaattccaagaacacgctgtatctgcaaatgaacagcctgcgtgccgaggacaccgcggtatattactgtgcgacagcggaggacgagccggggtatgactactggggtcagggaaccctggtcaccgtctcgagc

SEQ ID NO: 2053 - DNA, 354 bp, Homo sapiens
ggggtgcagctgttggagtctgggggaggcttggtacagcctggggggtccctgcgtctctcctgtgcagcctccggattcatctttgcttggtatgatatggggtgggtccgccaggctccagggaagggtctagagtgggtctcaagtattgattggaagggtggtaagacatactacgcagactccgtgaagggccggttcaccatctcccgcgacaattccaagaacacgctgtatctgcaaatgaacagcctgcgtgccgaggacaccgcggtatattactgtgcgacagcggaggacgagccggggtatgactactggggtcagggaaccctggtcaccgtctcgagc

SEQ ID NO: 2054 - DNA, 354 bp, Homo sapiens
ggggtgcagctgttggagtctgggggaggcttggtacagcctggggggtccctgcgtctctcctgtgcagcctccggattcatctttgcttggtatgatatgatgtgggcccgccaggctccagggaagggtctagagtgggtctcaagtattgattggaagggtatggagacatactacgcagactccgtgaagggccggttcaccatctcccgcgacaattccaagaacacgctgtatctgcaaatgaacagcctgcgtgccgaggacaccgcggtatattactgtgcgacagcggaggacgagccggggtatgactactggggtcagggaaccctggtcaccgtctcgagc

SEQ ID NO: 2055 - DNA, 354 bp, Homo sapiens
ggggtgcagctgttggagtctgggggaggcttggtacagcctggggggtccctgcgtctctcctgtgcagcctccggattcatctttgcttggtatgatatggggtgggcccgccaggctccagggaagggtctagagtgggtctcaagtattgattggaagggtggtaagacatactacgcagactccgtgaagggccggttcaccatctcccgcgacaattccaagaacacgctgtatctgcaaatgaacagcctgcgtgatgaggacaccgcggtatattactgtgcgacagcggaggacgagccggggtatgactactggggtcagggaaccctggtcaccgtctctagc

SEQ ID NO: 2056 - DNA, 354 bp, Homo sapiens
gaggtgcagctggtggagtctgggggaggcttggtacagcctggggggtccctgcgtctctcctgtgcagcctccggattcatctttgcttggtatgatatggggtgggcccgccaggctccagggaagggtctagagtgggtctcaagtattgattggaagggtggtaagacatactacgcagactccgtgaagggccggttcaccatctcccgcgacaattccaagaacacgctgtatctgcaaatgacgagcctgcgtgccgaggacaccgcggtatattactgtgcgacagcggaggacgagccggggtatgactactggggtcagggaaccctggtcaccgtctctagc

SEQ ID NO: 2057 - DNA, 354 bp, Homo sapiens
ggggtgcagctgttggagtctgggggaggcttggtacagcctggggggtccctgcgtctctcctgtgcagcctccggattcatctttgcttggtatgatatggggtgggcccgccaggctccagggaagggtctagagtgggtctcaagtattgattggaagggtggtaagacatactacgcagactccgtgaagggccggttcaccatctcccgcgacaattccaagaacacgctgtatctgcaaatgaacagcctgcgtgccgaggacaccgcggtatattactgtgcgacagcggaggacgagccggggtttgactactggggtcagggaaccctggtcaccgtctctagc

SEQ ID NO: 2058 - DNA, 354 bp, Homo sapiens
gaggtgcagctggtggagtctgggggaggcttggtaaagcctggggggtccctgcgtctctcctgtgcagcctccggattcatctttgcttggtatgatatggggtgggcccgccaggctccagggaagggtctagagtgggtctcaagtattgattggaagggtggtaagacatactacgcagcacccgtgaagggcagattcaccatctcaagagatgattcaaaaaacacgctgtatctgcaaatgaacagcctgaaaaccgaggacaccgcggtatattactgtgcgacagcggaggacgagccggggtatgactactggggtcagggaaccctggtcaccgtctctagc

SEQ ID NO: 2059 - DNA, 354 bp, Homo sapiens
ggggtgcagctgttggagtctgggggaggcttggtacagcctggggggtccctgcgtctctcctgtgcagcctccggattcatctttgcttggtatgatatggggtgggtccgccaggctccagggaagggtctagagtgggtctcaagtattgattggaagggtggtaagacatactacgcagactccgtgaagggccggttcaccatctcccgcgacaattccaagaacacgctgtatctgcaaatgaacagcctgcgtgccgaggacaccgcggtatattactgtgcgacagcggaggacgagccggggtttgactactggggtcagggaaccctggtcaccgtctctagc

SEQ ID NO: 2060 - DNA, 354 bp, Homo sapiens
ggggtgcagctgttggagtctgggggaggcttggtacagcctggggggtccctgcgtctctcctgtgcagcctccggattcatctttgcttggtatgatatgatgtgggcccgccaggctccagggaagggtctagagtgggtctcaagtattgattggcatggtgaggttacatactacgcagactccgtgaagggccggttcaccatctcccgcgacaattccaagaacacgctgtatctgcaaatgaacagcctgcgtgccgaggacaccgcggtatattactgtgcgacagcggaggacgagccggggtatgactactggggtcagggaaccctggtcaccgtctcgagc

SEQ ID NO: 2061 - DNA, 354 bp, Homo sapiens; identical to SEQ ID NO: 2018

SEQ ID NO: 2062 - DNA, 354 bp, Homo sapiens
gaggtgcagctgttggagtctgggggaggcttggtacagcctggggggtccctgcgtctctcctgtgcagcctccggattcatctttgcttggtatgatatggggtgggtccgccaggctccagggaagggtctagagtgggtctcaagtattgattggaagggtggtaagacatactacgcagactccgtgaagggccggttcaccatctcccgcgacaattccaagaacacgctgtatctgcaaatgaacagcctgcgtgccgaggacaccgcggtatattactgtgcgacagcggaggacgagccggggtatgactactggggtcagggaaccctggtcaccgtctcgagc

SEQ ID NO: 2063 - DNA, 354 bp, Homo sapiens
caggtgcagctgttggagtctgggggaggcttggtacagcctggggggtccctgcgtctctcctgtgcagcctccggattcatctttgcttggtatgatatggggtgggcccgccaggctccagggaagggtctagagtgggtctcaagtattgattggaagggtggtaagacatactacgcagactccgtgaagggccggttcaccatctcccgcgacaattccaagaacacgctgtatctgcaaatgaacagcctgcgtgccgaggacaccgcggtatattactgtgcgacagcggaggacgagccggggtatgactactggggtcagggaaccctggtcaccgtctcgagc

SEQ ID NO: 2064 - DNA, 354 bp, Homo sapiens
caggtgcagctgttggagtctgggggaggcttggtacagcctggggggtccctgcgtctctcctgtgcagcctccggattcatctttgcttggtatgatatggggtgggtccgccaggctccagggaagggtctagagtgggtctcaagtattgattggaagggtggtaagacatactacgcagactccgtgaagggccggttcaccatctcccgcgacaattccaagaacacgctgtatctgcaaatgaacagcctgcgtgccgaggacaccgcggtatattactgtgcgacagcggaggacgagccggggtatgactactggggtcagggaaccctggtcaccgtctcgagc

SEQ ID NO: 2065 - DNA, 354 bp, Homo sapiens
ggggtgcagctgttggagtctgggggaggcttggtacagcctggggggtccctgcgtctctcctgtgcagcctccggattcatctttgcttggtatgatatgatgtgggtccgccaggctccagggaagggtctagagtgggtctcaagtattgattggcatggtaatgttacatactacgcagactccgtgaagggccggttcaccatctcccgcgacaattccaagaacacgctgtatctgcaaatgaacagcctgcgtgccgaggacaccgcggtatattactgtgcgacagcggaggacgagccggggtatgactactggggtcagggaaccctggtcaccgtctcgagc

SEQ ID NO: 2066 - DNA, 354 bp, Homo sapiens
ggggtgcagctgttggagtctgggggaggcttggtacagcctggggggtccctgcgtctctcctgtgcagcctccggattcatctttgcttggtatgatatggggtgggtccgccaggctccagggaagggtctagagtgggtctcaagtattaatgatggtggtaatgttgggtactacgcagactccgtgaagggccggttcaccatctcccgcgacaattccaagaacacgctgtatctgcaaatgaacagcctgcgtgccgaggacaccgcggtatattactgtgcgacagcggaggacgagccggggtatgactactggggtcagggaaccctggtcaccgtctcgagc

SEQ ID NO: 2067 - DNA, 354 bp, Homo sapiens
ggggtgcagctgttggagtctgggggaggcttggtacagcctggggggtccctgcgtctctcctgtgcagcctccggattcatctttgcttggtatgatatggggtgggtccgccaggctccagggaagggtctagagtgggtctcaagtattaatgatggtggtaatgtttggtactacgcagactccgtgaagggccggttcaccatctcccgcgacaattccaagaacacgctgtatctgcaaatgaacagcctgcgtgccgaggacaccgcggtatattactgtgcgacagcggaggacgagccggggtatgactactggggtcagggaaccctggtcaccgtctcgagc

SEQ ID NO: 2068 - DNA, 354 bp, Homo sapiens
ggggtgcagctgttggagtctgggggaggcttggtacagcctggggggtccctgcgtctctcctgtgcagcctccggattcatctttgcttggtatgatatggggtgggtccgccaggctccagggaagggtctagagtgggtctcaagtattaatgatggtggtaatgttatgtactacgcagactccgtgaagggccggttcaccatctcccgcgacaattccaagaacacgctgtatctgcaaatgaacagcctgcgtgccgaggacaccgcggtatattactgtgcgacagcggaggacgagccggggtatgactactggggtcagggaaccctggtcaccgtctcgagc

SEQ ID NO: 2069 - DNA, 354 bp, Homo sapiens
ggggtgcagctgttggagtctgggggaggcttggtacagcctggggggtccctgcgtctctcctgtgcagcctccggattcatctttgcttggtatgatatggggtgggtccgccaggctccagggaagggtctagagtgggtctcaagtattaatgatggtggtaatgttaggtactacgcagactccgtgaagggccggttcaccatctcccgcgacaattccaagaacacgctgtatctgcaaatgaacagcctgcgtgccgaggacaccgcggtatattactgtgcgacagcggaggacgagccggggtatgactactggggtcagggaaccctggtcaccgtctcgagc

SEQ ID NO: 2070 - DNA, 354 bp, Homo sapiens
ggggtgcagctgttggagtctgggggaggcttggtacagcctggggggtccctgcgtctctcctgtgcagcctccggattcatctttgcttggtatgatatggggtgggtccgccaggctccagggaagggtctagagtgggtctcaagtattaatgatggtggtaatgttcagtactacgcagactccgtgaagggccggttcaccatctcccgcgacaattccaagaacacgctgtatctgcaaatgaacagcctgcgtgccgaggacaccgcggtatattactgtgcgacagcggaggacgagccggggtatgactactggggtcagggaaccctggtcaccgtctcgagc

SEQ ID NO: 2071 - DNA, 354 bp, Homo sapiens
ggggtgcagctgttggagtctgggggaggcttggtacagcctggggggtccctgcgtctctcctgtgcagcctccggattcatctttgcttggtatgatatggggtgggtccgccaggctccagggaagggtctagagtgggtctcaagtattaatgatggtggtaatgtttcctactacgcagactccgtgaagggccggttcaccatctcccgcgacaattccaagaacacgctgtatctgcaaatgaacagcctgcgtgccgaggacaccgcggtatattactgtgcgacagcggaggacgagccggggtatgactactggggtcagggaaccctggtcaccgtctcgagc

SEQ ID NO: 2072 - DNA, 354 bp, Homo sapiens
ggggtgcagctgttggagtctgggggaggcttggtacagcctggggggtccctgcgtctctcctgtgcagcctccggattcatctttgcttggtatgatatggggtgggtccgccaggctccagggaagggtctagagtgggtctcaagtattaatgatggtggtaatgttgagtactacgcagactccgtgaagggccggttcaccatctcccgcgacaattccaagaacacgctgtatctgcaaatgaacagcctgcgtgccgaggacaccgcggtatattactgtgcgacagcggaggacgagccggggtatgactactggggtcagggaaccctggtcaccgtctcgagc

SEQ ID NO: 2073 - DNA, 354 bp, Homo sapiens
ggggtgcagctgttggagtctgggggaggcttggtacagcctggggggtccctgcgtctctcctgtgcagcctccggattcatctttgcttggtatgatatggggtgggtccgccaggctccagggaagggtctagagtgggtctcaagtattaatgatggtggtaatgttttctactacgcagactccgtgaagggccggttcaccatctcccgcgacaattccaagaacacgctgtatctgcaaatgaacagcctgcgtgccgaggacaccgcggtatattactgtgcgacagcggaggacgagccggggtatgactactggggtcagggaaccctggtcaccgtctcgagc

SEQ ID NO: 2074 - DNA, 354 bp, Homo sapiens
ggggtgcagctgttggagtctgggggaggcttggtacagcctggggggtccctgcgtctctcctgtgcagcctccggattcatctttgcttggtatgatatggggtgggtccgccaggctccagggaagggtctagagtgggtctcaagtattaatgatggtggtaatgttctctactacgcagactccgtgaagggccggttcaccatctcccgcgacaattccaagaacacgctgtatctgcaaatgaacagcctgcgtgccgaggacaccgcggtatattactgtgcgacagcggaggacgagccggggtatgactactggggtcagggaaccctggtcaccgtctcgagc

SEQ ID NO: 2075 - DNA, 354 bp, Homo sapiens
ggggtgcagctgttggagtctgggggaggcttggtacagcctggggggtccctgcgtctctcctgtgcagcctccggattcatctttgcttggtatgatatggggtgggtccgccaggctccagggaagggtctagagtgggtctcaagtattaatgatggtggtaatgttccgtactacgcagactccgtgaagggccggttcaccatctcccgcgacaattccaagaacacgctgtatctgcaaatgaacagcctgcgtgccgaggacaccgcggtatattactgtgcgacagcggaggacgagccggggtatgactactggggtcagggaaccctggtcaccgtctcgagc

SEQ ID NO: 2076 - DNA, 354 bp, Homo sapiens
ggggtgcagctgttggagtctgggggaggcttggtacagcctggggggtccctgcgtctctcctgtgcagcctccggattcatctttgcttggtatgatatggggtgggcccgccaggctccagggaagggtctagagtgggtctcaagtattgattggaagggtggtaagacatactacgcagactccgtgaagggccggttcaccatctccgccgacaattccaagaacacgctgtatctgcaaatgaacagcctgcgtgccgaggacaccgcggtatattactgtgcgacagcggaggacgagccggggtatgactactggggtcagggaaccctggtcaccgtctcgagc

SEQ ID NO: 2077 - DNA, 354 bp, Homo sapiens
ggggtgcagctgttggagtctgggggaggcttggtacagcctggggggtccctgcgtctctcctgtgcagcctccggattcatctttgcttggtatgatatggggtgggcccgccaggctccagggaagggtctagagtgggtctcaagtattgattggaagggtggtaagacatactacgcagactccgtgaagggccggttcaccatctccaaggacaattccaagaacacgctgtatctgcaaatgaacagcctgcgtgccgaggacaccgcggtatattactgtgcgacagcggaggacgagccggggtatgactactggggtcagggaaccctggtcaccgtctcgagc

SEQ ID NO: 2078 - DNA, 360 bp, Homo sapiens
ggggtgcagctgttggagtctgggggaggcttggtacagcctggggggtccctgcgtctctcctgtgcagcctccggattcatctttgcttggtatgatatggggtgggcccgccaggctccagggaagggtctagagtgggtctcaagtattgattggaaaactaagggtggtaagacatactacgcagactccgtgaagggccggttcaccatctcccgcgacaattccaagaacacgctgtatctgcaaatgaacagcctgcgtgccgaggacaccgcggtatattactgtgcgacagcggaggacgagccggggtatgactactggggtcagggaaccctggtcaccgtctcgagc

SEQ ID NO: 2079 - DNA, 360 bp, Homo sapiens
ggggtgcagctgttggagtctgggggaggcttggtacagcctggggggtccctgcgtctctcctgtgcagcctccggattcatctttgcttggtatgatatggggtgggcccgccaggctccagggaagggtctagagtgggtctcaagtattgattggaaagcaaagggtggtaagacatactacgcagactccgtgaagggccggttcaccatctcccgcgacaattccaagaacacgctgtatctgcaaatgaacagcctgcgtgccgaggacaccgcggtatattactgtgcgacagcggaggacgagccggggtatgactactggggtcagggaaccctggtcaccgtctcgagc

SEQ ID NO: 2080 - DNA, 354 bp, Homo sapiens
gaggtgcagctgttggagtctgggggaggcttggtacagcctggggggtccctgcgtctctcctgtgcagcctccggattcatctttgcttggtatgatatggggtgggcccgccaggctccagggaagggtctagagtgggtctcaagtattgattggaagggtggtaagacatactacgcagactccgtgaagggccggttcaccatctcccgcgacaattccaagaacacgctgtatctgcaaatgaacagcctgcgtgatgaggacaccgcggtatattactgtgcgacagcggaggacgagccggggtatgactactggggtcagggaaccctggtcaccgtctcgagc

SEQ ID NO: 2081 - DNA, 354 bp, Homo sapiens
ggggtgcagctgttggagtctgggggaggcttggtacagcctggggggtccctgcgtctctcctgtgcagcctccggattcatctttgcttggtatgatatgaagtgggcccgccaggctccagggaagggtctagagtgggtctcaagtattgattggcatggtgaggttacatactacgcagactccgtgaagggccggttcaccatctcccgcgacaattccaagaacacgctgtatctgcaaatgaacagcctgcgtgccgaggacaccgcggtatattactgtgcgacagcggaggacgagccggggtatgactactggggtcagggaaccctggtcaccgtctcgagc

SEQ ID NO: 2082 - DNA, 354 bp, Homo sapiens
ggggtgcagctgttggagtctgggggaggcttggtacagcctggggggtccctgcgtctctcctgtgcagcctccggattcatctttgcttggtatgatatgatgtgggtccgccaggctccagggaagggtctagagtgggtctcaagtattgattggcatggtgaggttacatactacgcagactccgtgaagggccggttcaccatctcccgcgacaattccaagaacacgctgtatctgcaaatgaacagcctgcgtgccgaggacaccgcggtatattactgtgcgacagcggaggacgagccggggtatgactactggggtcagggaaccctggtcaccgtctcgagc

SEQ ID NO: 2083 - DNA, 354 bp, Homo sapiens
ggggtgcagctgttggagtctgggggaggcttggtacagcctggggggtccctgcgtctctcctgtgcagcctccggattcatctttgcttggtatgatatggggtgggtccgccaggctccagggaagggtctagagtgggtctcaagtattaatgatggtggtaatgttgcctactacgcagactccgtgaagggccggttcaccatctcccgcgacaattccaagaacacgctgtatctgcaaatgaacagcctgcgtgccgaggacaccgcggtatattactgtgcgacagcggaggacgagccggggtatgactactggggtcagggaaccctggtcaccgtctcgagc

SEQ ID NO: 2084 - DNA, 357 bp, Homo sapiens
ggggtgcagctgttggagtctgggggaggcttggtacagcctggggggtccctgcgtctctcctgtgcagcctccggattcatctttgcttgggcatatgatatggggtgggcccgccaggctccagggaagggtctagagtgggtctcaagtattgattggaagggtggtaagacatactacgcagactccgtgaagggccggttcaccatctcccgcgacaattccaagaacacgctgtatctgcaaatgaacagcctgcgtgccgaggacaccgcggtatattactgtgcgacagcggaggacgagccggggtatgactactggggtcagggaaccctggtcaccgtctcgagc

SEQ ID NO: 2085 - DNA, 357 bp, Homo sapiens
ggggtgcagctgttggagtctgggggaggcttggtacagcctggggggtccctgcgtctctcctgtgcagcctccggattcatctttgcttggagttatgatatggggtgggcccgccaggctccagggaagggtctagagtgggtctcaagtattgattggaagggtggtaagacatactacgcagactccgtgaagggccggttcaccatctcccgcgacaattccaagaacacgctgtatctgcaaatgaacagcctgcgtgccgaggacaccgcggtatattactgtgcgacagcggaggacgagccggggtatgactactggggtcagggaaccctggtcaccgtctcgagc

SEQ ID NO: 2086 - DNA, 354 bp, Homo sapiens
ggggtgcagctgttggagtctgggggaggcttggtacagcctggggggtccctgcgtctctcctgtgcagtctccggattcatctttgcttggtatgatatggggtgggcccgccaggctccagggaagggtctagagtgggtctcaagtattgattggaagggtggtaagacatactacgcagactccgtgaagggccggttcaccatctcccgcgacaattccaagaacacgctgtatctgcaaatgaacagcctgcgtgccgaggacaccgcggtatattactgtgcgacagcggaggacgagccggggtatgactactggggtcagggaaccctggtcaccgtctcgagc

SEQ ID NO: 2087 - DNA, 354 bp, Homo sapiens
ggggtgcagctgttggagtctgggggaggcttggtacagcctggggggtccctgcgtctctcctgtgcagcctccggattcatctttgcttggtatgatatgaagtgggcccgccaggctccagggaagggtctagagtgggtctcaagtattgattggcatggtgaggttacatactacgcagactccgtgaagggccggttcaccatctcccgcgacaattccaagaacacgctgtatctgcaaatgaacagcctgcgtgatgaggacaccgcggtatattactgtgcgacagcggaggacgagccggggtatgactactggggtcagggaaccctggtcaccgtctcgagc

SEQ ID NO: 2088 - DNA, 354 bp, Homo sapiens
gaggtgcagctgttggagtctgggggaggcttggtacagcctggggggtccctgcgtctctcctgtgcagcctccggattcacctttgatagggaggagatggattgggtccgccaggctccagggaagggtctagagtgggtctcaagtattgattggaagggtggtaagacatactacgcagactccgtgaagggccggttcaccatctcccgcgacaattccaagaacacgctgtatctgcaaatgaacagcctgcgtgccgaggacaccgcggtatattactgtgcgacagcggaggacgagccggggtatgactactggggtcagggaaccctggtcaccgtctcgagc

SEQ ID NO: 2089 - DNA, 355 bp, Homo sapiens
ggggtgcagctgttggagtctgggggaggcttggtacagcctggggggtccctgcgtctctcctgtgcagcctccggattcatctttgcttggtatgatatgaagtgggtccgccaggctccagggaagggtctagagtgggtctcaagtattgattggcatggtgaggttacatactacgcagactccgtgaagggccggttcaccatctcccgcgacaattccaagaacacgctgtatctgcaaatgaacagcctgcgtgatgaggacaccgcggtatattactgtgcgacagcggaggacgagccggggtatgactactggggtcagggaaccctggtcaccgtctcgagct

SEQ ID NO: 2090 - DNA, 354 bp, Homo sapiens
ggggtgcagctgttggagtctgggggaggcttggtacagcctggggggtccctgcgtctctcctgtgcagcctccggatactccttcgcttggtatgatatggggtgggtccgccaggctccagggaagggtctagagtgggtctcaagtattgattggaagggtggtaagacatactacgcagactccgtgaagggccggttcaccatctcccgcgacaattccaagaacacgctgtatctgcaaatgaacagcctgcgtgccgaggacaccgcggtatattactgtgcgacagcggaggacgagccggggtatgactactggggtcagggaaccctggtcaccgtctcgagc

SEQ ID NO: 2091 - DNA, 354 bp, Homo sapiens
ggggtgcagctgttggagtctgggggaggcttggtacagcctggggggtccctgcgtctctcctgtgcagcctccggattcacgtttggggcgtatgatatggggtgggtccgccaggctccagggaagggtctagagtgggtctcaagtattgattggaagggtggtaagacatactacgcagactccgtgaagggccggttcaccatctcccgcgacaattccaagaacacgctgtatctgcaaatgaacagcctgcgtgccgaggacaccgcggtatattactgtgcgacagcggaggacgagccggggtatgactactggggtcagggaaccctggtcaccgtctcgagc

SEQ ID NO: 2092 - DNA, 354 bp, Homo sapiens
ggggtgcagctgttggagtctgggggaggcttggtacagcctggggggtccctgcgtctctcctgtgcagcctccggattcacctttcccttctatgatatggggtgggtccgccaggctccagggaagggtctagagtgggtctcaagtattgattggaagggtggtaagacatactacgcagactccgtgaagggccggttcaccatctcccgcgacaattccaagaacacgctgtatctgcaaatgaacagcctgcgtgccgaggacaccgcggtatattactgtgcgacagcggaggacgagccggggtatgactactggggtcagggaaccctggtcaccgtctcgagc

SEQ ID NO: 2093 - DNA, 354 bp, Homo sapiens
ggggtgcagctgttggagtctgggggaggcttggtacagcctggggggtccctgcgtctctcctgtgcagcctccggattcgtctttgccacgtatgatatggggtgggtccgccaggctccagggaagggtctagagtgggtctcaagtattgattggaagggtggtaagacatactacgcagactccgtgaagggccggttcaccatctcccgcgacaattccaagaacacgctgtatctgcaaatgaacagcctgcgtgccgaggacaccgcggtatattactgtgcgacagcggaggacgagccggggtatgactactggggtcagggaaccctggtcaccgtctcgagc

SEQ ID NO: 2094 - DNA, 354 bp, Homo sapiens
ggggtgcagctgttggagtctgggggaggcttggtacagcctggggggtccctgcgtctctcctgtgcagcctccggattcagcttttcggtgtatgatatggggtgggtccgccaggctccagggaagggtctagagtgggtctcaagtattgattggaagggtggtaagacatactacgcagactccgtgaagggccggttcaccatctcccgcgacaattccaagaacacgctgtatctgcaaatgaacagcctgcgtgccgaggacaccgcggtatattactgtgcgacagcggaggacgagccggggtatgactactggggtcagggaaccctggtcaccgtctcgagc

SEQ ID NO: 2095 - DNA, 354 bp, Homo sapiens
ggggtgcagctgttggagtctgggggaggcttggtacagcctggggggtccctgcgtctctcctgtgcagcctccggactcatgttgtccgcgtatgatatggggtgggtccgccaggctccagggaagggtctagagtgggtctcaagtattgattggaagggtggtaagacatactacgcagactccgtgaagggccggttcaccatctcccgcgacaattccaagaacacgctgtatctgcaaatgaacagcctgcgtgccgaggacaccgcggtatattactgtgcgacagcggaggacgagccggggtatgactactggggtcagggaaccctggtcaccgtctcgagc

SEQ ID NO: 2096 - DNA, 354 bp, Homo sapiens
ggggtgcagctgttggagtctgggggaggcttggtacagcctggggggtccctgcgtctctcctgtgcagcctccggattcctcttcaccacgtatgatatggggtgggtccgccaggctccagggaagggtctagagtgggtctcaagtattgattggaagggtggtaagacatactacgcagactccgtgaagggccggttcaccatctcccgcgacaattccaagaacacgctgtatctgcaaatgaacagcctgcgtgccgaggacaccgcggtatattactgtgcgacagcggaggacgagccggggtatgactactggggtcagggaaccctggtcaccgtctcgagc

SEQ ID NO: 2097 - DNA, 354 bp, Homo sapiens
ggggtgcagctgttggagtctgggggaggcttggtacagcctggggggtccctgcgtctctcctgtgcagcctccggattcaccttcgcttggtatgatatggggtgggtccgccaggctccagggaagggtctagagtgggtctcaagtattgattggaagggtggtaagacatactacgcagactccgtgaagggccggttcaccatctcccgcgacaattccaagaacacgctgtatctgcaaatgaacagcctgcgtgccgaggacaccgcggtatattactgtgcgacagcggaggacgagccggggtatgactactggggtcagggaaccctggtcaccgtctcgagc

SEQ ID NO: 2098 - DNA, 354 bp, Homo sapiens
ggggtgcagctgttggagtctgggggaggcttggtacagcctggggggtccctgcgtctctcctgtgcagcctccggattctccttcgcttggtatgatatggggtgggtccgccaggctccagggaagggtctagagtgggtctcaagtattgattggaagggtggtaagacatactacgcagactccgtgaagggccggttcaccatctcccgcgacaattccaagaacacgctgtatctgcaaatgaacagcctgcgtgccgaggacaccgcggtatattactgtgcgacagcggaggacgagccggggtatgactactggggtcagggaaccctggtcaccgtctcgagc

SEQ ID NO: 2099 - DNA, 354 bp, Homo sapiens
ggggtgcagctgttggagtctgggggaggcttggtacagcctggggggtccctgcgtctctcctgtgcagcctccggattcatgttttccggctatgatatggggtgggtccgccaggctccagggaagggtctagagtgggtctcaagtattgattggaagggtggtaagacatactacgcagactccgtgaagggccggttcaccatctcccgcgacaattccaagaacacgctgtatctgcaaatgaacagcctgcgtgccgaggacaccgcggtatattactgtgcgacagcggaggacgagccggggtatgactactggggtcagggaaccctggtcaccgtctcgagc

SEQ ID NO: 2100 - DNA, 354 bp, Homo sapiens
ggggtgcagctgttggagtctgggggaggcttggtacagcctggggggtccctgcgtctctcctgtgcagcctccggattcttcttcccctggtatgatatggggtgggtccgccaggctccagggaagggtctagagtgggtctcaagtattgattggaagggtggtaagacatactacgcagactccgtgaagggccggttcaccatctcccgcgacaattccaagaacacgctgtatctgcaaatgaacagcctgcgtgccgaggacaccgcggtatattactgtgcgacagcggaggacgagccggggtatgactactggggtcagggaaccctggtcaccgtctcgagc

SEQ ID NO: 2101 - DNA, 354 bp, Homo sapiens
ggggtgcagctgttggagtctgggggaggcttggtacagcctggggggtccctgcgtctctcctgtgcagcctccggattctccttcctctggtatgatatggggtgggtccgccaggctccagggaagggtctagagtgggtctcaagtattgattggaagggtggtaagacatactacgcagactccgtgaagggccggttcaccatctcccgcgacaattccaagaacacgctgtatctgcaaatgaacagcctgcgtgccgaggacaccgcggtatattactgtgcgacagcggaggacgagccggggtatgactactggggtcagggaaccctggtcaccgtctcgagc

SEQ ID NO: 2102 - DNA, 354 bp, Homo sapiens
ggggtgcagctgttggagtctgggggaggcttggtacagcctggggggtccctgcgtctctcctgtgcagcctccggattcatctttgctgtgtatgatatggggtgggtccgccaggctccagggaagggtctagagtgggtctcaagtattgattggcatggtaagattacatactacgcagactcagtgaagggccggttcaccatctcccgcgacaattccaagaacacgctgtatctgcaaatgaacagcctgcgtgccgaggacaccgcggtatattactgtgcgacagcggaggacgagccggggtatgactactggggtcagggaaccctggtcaccgtctcgagc

SEQ ID NO: 2103 - DNA, 354 bp, Homo sapiens
ggggtgcagctgttggagtctgggggaggcttggtacagcctggggggtccctgcgtctctcctgtgcagcctccggattcatctttgcttggtatgatatgaagtgggtccgccaggctccagggaagggtctagagtgggtctcaagtattgattggcatggtaagattacatactacgcagactccgtgaagggccggttcaccatctcccgcgacaattccaagaacacgctgtatctgcaaatgaacagcctgcgtgccgaggacaccgcggtatattactgtgcgacagcggaggacgagccggggtatgactactggggtcagggaaccctggtcaccgtctcgagc

SEQ ID NO: 2104 - DNA, 354 bp, Homo sapiens
ggggtgcagctgttggagtctgggggaggcttggtacagcctggggggtccctgcgtctctcctgtgcagcctccggattcaccttcgcttggtatgatatggggtgggtccgccaggctccagggaagggtctagagtgggtctcaagtattgattggcatggtaagattacatactacgcagactccgtgaagggccggttcaccatctcccgcgacaattccaagaacacgctgtatctgcaaatgaacagcctgcgtgccgaggacaccgcggtatattactgtgcgacagcggaggacgagccggggtatgactactggggtcagggaaccctggtcaccgtctctagc

SEQ ID NO: 2105 - DNA, 354 bp, Homo sapiens
ggggtgcagctgttggagtctgggggaggcttggtacagcctggggggtccctgcgtctctcctgtgcagcctccggattcaccttcgcttggtatgatatggggtgggtccgccaggctccagggaagggtctagagtgggtctcaagtattgattggcatggtgaggttacatactacgcagactccgtgaagggccggttcaccatctcccgcgacaattccaagaacacgctgtatctgcaaatgaacagcctgcgtgccgaggacaccgcggtatattactgtgcgacagcggaggacgagccggggtatgactactggggccagggaaccctggtcaccgtctctagc

SEQ ID NO: 2106 - DNA, 354 bp, Homo sapiens
ggggtgcagctgttggagtctgggggaggcttggtacagcctggggggtccctgcgtctctcctgtgcagcctccggattcatctttgggtggtatgatatggggtgggtccgccaggctccagggaagggtctagagtgggtctcaagtattgattggaagggtggtaagacatactacgcagactccgtgaagggccggttcaccatctcccgcgacaattccaagaacacgctgtatctgcaaatgaacagcctgcgtgccgaggacaccgcggtatattactgtgcgacagcggaggacgagccggggtatgactactggggtcagggaaccctggtcaccgtctcgagc

SEQ ID NO: 2107 - DNA, 354 bp, Homo sapiens
ggggtgcagctgttggagtctgggggaggcttggtacagcctggggggtccctgcgtctctcctgtgcagcctccggattcatctttgggtggtatgacatggggtgggtccgccaggctccagggaagggtctagagtgggtctcaagtattgattggaagggtggtaagacatactacgcagactccgtgaagggccggttcaccatctcccgcgacaattccaagaacacgctgtatctgcaaatgaacagcctgcgtgccgaggacaccgcggtatattactgtgcgacagcggaggacgagccggggtatgactactggggtcagggaaccctggtcaccgtctcgagc

SEQ ID NO: 2108 - DNA, 354 bp, Homo sapiens
ggggtgcagctgttggagtctgggggaggcttggtacagcctggggggtccctgcgtctctcctgtgcagcctccggattcaacttcgcttggtatgatatggggtgggtccgccaggctccagggaagggtctagagtgggtctcaagtattgattggaagggtggtaagacatactacgcagactccgtgaagggccggttcaccatctcccgcgacaattccaagaacacgctgtatctgcaaatgaacagcctgcgtgccgaggacaccgcggtatattactgtgcgacagcggaggacgagccggggtatgactactggggtcagggaaccctggtcaccgtctcgagc

SEQ ID NO: 2109 - DNA, 354 bp, Homo sapiens
ggggtgcagctgttggagtctgggggaggcttggtacagcctggggggtccctgcgtctctcctgtgcagcctccggattcatgttctcctggtatgatatggggtgggtccgccaggctccagggaagggtctagagtgggtctcaagtattgattggaagggtggtaagacatactacgcagactccgtgaagggccggttcaccatctcccgcgacaattccaagaacacgctgtatctgcaaatgaacagcctgcgtgccgaggacaccgcggtatattactgtgcgacagcggaggacgagccggggtatgactactggggtcagggaaccctggtcaccgtctcgagc

SEQ ID NO: 2110 - DNA, 354 bp, Homo sapiens
ggggtgcagctgttggagtctgggggaggcttggtacagcctggggggtccctgcgtctctcctgtgcagcctccggattcgtgttcccgtggtatgatatggggtgggtccgccaggctccagggaagggtctagagtgggtctcaagtattgattggaagggtggtaagacatactacgcagactccgtgaagggccggttcaccatctcccgcgacaattccaagaacacgctgtatctgcaaatgaacagcctgcgtgccgaggacaccgcggtatattactgtgcgacagcggaggacgagccggggtatgactactggggtcagggaaccctggtcaccgtctcgagc

SEQ ID NO: 2111 - DNA, 354 bp, Homo sapiens
ggggtgcagctgttggagtctgggggaggcttggtacagcctggggggtccctgcgtctctcctgtgcagcctccggattcatctttcggtggtatgacatggggtgggtccgccaggctccagggaagggtctagagtgggtctcaagtattgattggaagggtggtaagacatactacgcagactccgtgaagggccggttcaccatctcccgcgacaattccaagaacacgctgtatctgcaaatgaacagcctgcgtgccgaggacaccgcggtatattactgtgcgacagcggaggacgagccggggtatgactactggggtcagggaaccctggtcaccgtctcgagc

SEQ ID NO: 2112 - DNA, 354 bp, Homo sapiens
ggggtgcagctgttggagtctgggggaggcttggtacagcctggggggtccctgcgtctctcctgtgcagcctccggattcttgttcttctggtatgatatggggtgggtccgccaggctccagggaagggtctagagtgggtctcaagtattgattggaagggtggtaagacatactacgcagactccgtgaagggccggttcaccatctcccgcgacaattccaagaacacgctgtatctgcaaatgaacagcctgcgtgccgaggacaccgcggtatattactgtgcgacagcggaggacgagccggggtatgactactggggtcagggaaccctggtcaccgtctcgagc

SEQ ID NO: 2113 - DNA, 354 bp, Homo sapiens
ggggtgcagctgttggagtctgggggaggcttggtacagcctggggggtccctgcgtctctcctgtgcagcctccggattcatctttgcttggtatgatatggggtgggcccgccaggctccagggaagggtctagagtgggtctcaattattgcctgcaagggtggtaagacatactacgcagactccgtgaagggccggttcaccatctcccgcgacaattccaagaacacgctgtatctgcaaatgaacagcctgcgtgccgaggacaccgcggtatattactgtgcgacagcggaggacgagccggggtatgactactggggtcagggaaccctggtcaccgtctcgagc

SEQ ID NO: 2114 - DNA, 354 bp, Homo sapiens
ggggtgcagctgttggagtctgggggaggcttggtacagcctggggggtccctgcgtctctcctgtgcagcctccggattcatctttgcttggtatgatatggggtgggcccgccaggctccagggaagggtctagagtgggtctcaaagattggggacaagggtggtaagacatactacgcagactccgtgaagggccggttcaccatctcccgcgacaattccaagaacacgctgtatctgcaaatgaacagcctgcgtgccgaggacaccgcggtatattactgtgcgacagcggaggacgagccggggtatgactactggggtcagggaaccctggtcaccgtctcgagc

SEQ ID NO: 2115 - DNA, 354 bp, Homo sapiens
ggggtgcagctgttggagtctgggggaggcttggtacagcctggggggtccctgcgtctctcctgtgcagcctccggattcgtgttttcgtggtatgatatggggtgggtccgccaggctccagggaagggtctagagtgggtctcaagtattgatctcgccggtcgcaagacatactacgcagactccgtgaagggccggttcaccatctcccgcgacaattccaagaacacgctgtatctgcaaatgaacagcctgcgtgccgaggacaccgcggtatattactgtgcgacagcggaggacgagccggggtatgactactggggtcagggaaccctggtcaccgtctcgagc

SEQ ID NO: 2116 - DNA, 354 bp, Homo sapiens
ggggtgcagctgttggagtctgggggaggcttggtacagcctggggggtccctgcgtctctcctgtgcagcctccggattctggtacgacgtgtatgatatggggtgggtccgccaggctccagggaagggtctagagtgggtctcaagtattgattggaagggtggtaagacatactacgcagactccgtgaagggccggttcaccatctcccgcgacaattccaagaacacgctgtatctgcaaatgaacagcctgcgtgccgaggacaccgcggtatattactgtgcgacagcggaggacgagccggggtatgactactggggtcagggaaccctggtcaccgtctcgagc

SEQ ID NO: 2117 - DNA, 354 bp, Homo sapiens
ggggtgcagctgttggagtctgggggaggcttggtacagcctggggggtccctgcgtctctcctgtgcagcctccggattcgtcttcgcttggtatgatatggggtgggtccgccaggctccagggaagggtctagagtgggtctcaagtattgattggaagggtggtaagacatactacgcagactccgtgaagggccggttcaccatctcccgcgacaattccaagaacacgctgtatctgcaaatgaacagcctgcgtgccgaggacaccgcggtatattactgtgcgacagcggaggacgagccggggtatgactactggggtcagggaaccctggtcaccgtctcgagc

SEQ ID NO: 2118 - DNA, 354 bp, Homo sapiens
ggggtgcagctgttggagtctgggggaggcttggtacagcctggggggtccctgcgtctctcctgtgcagcctccggattcttgttcagcacgtatgatatggggtgggtccgccaggctccagggaagggtctagagtgggtctcaagtattgattggaagggtggtaagacatactacgcagactccgtgaagggccggttcaccatctcccgcgacaattccaagaacacgctgtatctgcaaatgaacagcctgcgtgccgaggacaccgcggtatattactgtgcgacagcggaggacgagccggggtatgactactggggtcagggaaccctggtcaccgtctcgagc

SEQ ID NO: 2119 - DNA, 354 bp, Homo sapiens
ggggtgcagctgttggagtctgggggaggcttggtacagcctggggggtccctgcgtctctcctgtgcagcctccggattgttgttcgcggcctatgatatggggtgggtccgccaggctccagggaagggtctagagtgggtctcaagtattgattggaagggtggtaagacatactacgcagactccgtgaagggccggttcaccatctcccgcgacaattccaagaacacgctgtatctgcaaatgaacagcctgcgtgccgaggacaccgcggtatattactgtgcgacagcggaggacgagccggggtatgactactggggtcagggaaccctggtcaccgtctcgagc

SEQ ID NO: 2120 - DNA, 354 bp, Homo sapiens
ggggtgcagctgttggagtctgggggaggcttggtacagcctggggggtccctgcgtctctcctgtgcagcctccggattcgtcttcgacgtctatgatatggggtgggcccgccaggctccagggaagggtctagagtgggtctcaagtattgattggaagggtggtaagacatactacgcagactccgtgaagggccggttcaccatctcccgcgacaattccaagaacacgctgtatctgcaaatgaacagcctgcgtgccgaggacaccgcggtatattactgtgcgacagcggaggacgagccggggtatgactactggggtcagggaaccctggtcaccgtctcgagc

SEQ ID NO: 2121 - DNA, 354 bp, Homo sapiens
ggggtgcagctgttggagtctgggggaggcttggtacagcctggggggtccctgcgtctctcctgtgcagcctccggattcatctttgcttggtatgatatggggtgggtccgccaggctccagggaagggtctagagtgggtctcaagtattgattggaagggtggtaagacatactacgcagactccgtgaagggccggttcaccatctcccgcgacaattccaagaacacgctgtatctgcaaatgaacagcctgcgtgccgaggacaccgcggtatattactgtgcgacagcggacgacgagccggggtatgactactggggtcagggaaccctggtcaccgtctcgagc

SEQ ID NO: 2122 - DNA, 354 bp, Homo sapiens
ggggtgcagctgttggagtctgggggaggcttggtacagcctggggggtccctgcgtctctcctgtgcagcctccggattcatctttgcttggtatgatatggggtgggcccgccaggctccagggaagggtctagagtgggtctcaagtattgattggaagggtaacaagacatactacgcagactccgtgaagggccggttcaccatctcccgcgacaattccaagaacacgctgtatctgcaaatgaacagcctgcgtgccgaggacaccgcggtatattactgtgcgacagcggaggacgagccggggtatgactactggggtcagggaaccctggtcaccgtctcgagc

SEQ ID NO: 2123 - DNA, 354 bp, Homo sapiens
ggggtgcagctgttggagtctgggggaggcttggtacagcctggggggtccctgcgtctctcctgtgcagcctccggattcatctttgctacgtatgacatgaggtgggtccgccaggctccagggaagggtctagagtgggtctcaagtattgattggaagggtggtaagacatactacgcagactccgtgaagggccggttcaccatctcccgcgacaattccaagaacacgctgtatctgcaaatgaacagcctgcgtgccgaggacaccgcggtatattactgtgcgacagcggaggacgagccggggtatgactactggggtcagggaaccctggtcaccgtctcgagc

SEQ ID NO: 2124 - DNA, 354 bp, Homo sapiens
ggggtgcagctgttggagtctgggggaggcttggtacagcctggggggtccctgcgtctctcctgtgcagcctccggattcaccatgaactggtatgatatggggtgggtccgccaggctccagggaagggtctagagtgggtctcaagtattgattggaagggtggtaagacatactacgcagactccgtgaagggccggttcaccatctcccgcgacaattccaagaacacgctgtatctgcaaatgaacagcctgcgtgccgaggacaccgcggtatattactgtgcgacagcggaggacgagccggggtatgactactggggtcagggaaccctggtcaccgtctcgagc

SEQ ID NO: 2125 - DNA, 354 bp, Homo sapiens
ggggtgcagctgttggagtctgggggaggcttggtacagcctggggggtccctgcgtctctcctgtgcagcctccggattcatctttcacacctatgacatggggtgggtccgccaggctccagggaagggtctagagtgggtctcaagtattgattggaagggtggtaagacatactacgcagactccgtgaagggccggttcaccatctcccgcgacaattccaagaacacgctgtatctgcaaatgaacagcctgcgtgccgaggacaccgcggtatattactgtgcgacagcggaggacgagccggggtatgactactggggtcagggaaccctggtcaccgtctcgagc

SEQ ID NO: 2126 - DNA, 354 bp, Homo sapiens
ggggtgcagctgttggagtctgggggaggcttggtacagcctggggggtccctgcgtctctcctgtgcagcctccggattcttgttttgggtgtatgatatggggtgggtccgccaggctccagggaagggtctagagtgggtctcaagtattgattccatcggtgccaagacatactacgcagactccgtgaagggccggttcaccatctcccgcgacaattccaagaacacgctgtatctgcaaatgaacagcctgcgtgccgaggacaccgcggtatattactgtgcgacagcggaggacgagccggggtatgactactggggtcagggaaccctggtcaccgtctcgagc

SEQ ID NO: 2127 - DNA, 354 bp, Homo sapiens
ggggtgcagctgttggagtctgggggaggcttggtacagcctggggggtccctgcgtctctcctgtgcagcctccggattcatctttgcttggtatgatatggggtgggcccgccaggctccagggaagggtctagagtgggtctcaaccattgacaacaagggtggtaagacatactacgcagactccgtgaagggccggttcaccatctcccgcgacaattccaagaacacgctgtatctgcaaatgaacagcctgcgtgccgaggacaccgcggtatattactgtgcgacagcggaggacgagccggggtatgactactggggtcagggaaccctggtcaccgtctcgagc

SEQ ID NO: 2128 - DNA, 354 bp, Homo sapiens; identical to SEQ ID NO: 2098

SEQ ID NO: 2129 - protein, 118 aa, Homo sapiens
EVQLLESGGGLVQPGGSLRLSCAASGFTFPKYDMMWVRQAPGKGLEWVSSIDHLGVNTYYADSVKGRFTISRDNSKNTLYLQMNSLRAEDTAVYYCAKESDWPSFDYWGQGTLVTVSS

SEQ ID NO: 2130 - protein, 116 aa, Homo sapiens
EVQLLESGGGLVQPGGSLRLSCAASGFTFDVYEMDWVRQAPGKGLEWVSSISAYGDQTYYADSVKGRFTISRDNSKNTLYLQMNSLRAEDTAVYYCAKSGTGFDYWGQGTLVTVSS

SEQ ID NO: 2131 - protein, 116 aa, Homo sapiens
EVQLLESGGGLVQPGGSLRLSCAASGFTFPDAEMDWVRQAPGKGLEWVSTISPEGTNTYYADSVKGRFTISRDNSKNTLYLQMNSLRAEDTAVYYCAKAGMSFDYWGQGTLVTVSS

SEQ ID NO: 2132 - protein, 116 aa, Homo sapiens
EVQLLESGGGLVQPGGSLRLSCAASGFTFPSDEMDWVRQAPGKGLEWVSAIDPKGSRTYYADSVKGRFTISRDNSKNTLYLQMNSLRAEDTAVYYCAKAGSGFDYWGQGTLVTVSS

SEQ ID NO: 2133 - protein, 116 aa, Homo sapiens
EVQLLESGGGLVQPGGSLRLSCAASGFTFGEYEMDWVRQAPGKGLEWVSSINSVGFLTYYADSVKGRFTISRDNSKNTLYLQMNSLRAEDTAVYYCAKAGSSFDYWGQGTLVTVSS

SEQ ID NO: 2134 - protein, 116 aa, Homo sapiens
EVQLLESGGGLVQPGGSLRLSCAASGFTFKEVEMDWVRQAPGKGLEWVSTIDGSGVGTYYADSVKGRFTISRDNSKNTLYLQMNSLRAEDTAVYYCAKGGTSFDYWGQGTLVTVSS

SEQ ID NO: 2135 - protein, 116 aa, Homo sapiens
EVQLLESGGGLVEPGGSLRLSCAASGFTFHESEMDWVRQAPGKGLEWVSTINGSGESTYYADSVKGRFTISRDNSKNTLYLQMNSLRAEDTAVYYCAKAGTSFDYWGQGTLVTVSS

SEQ ID NO: 2136 - protein, 116 aa, Homo sapiens
EVQLLESGGGLVQPGGSLRLSCAASGFTFHTMEMDWVRQAPGKGLEWVSTIDGLGTHTYYADSVKGRFTISRDNSKNTLYLQMNSLRAEDTAVYYCAKAGDSFDYWGQGTLVTVSS

SEQ ID NO: 2137 - protein, 116 aa, Homo sapiens
EVQLLESGGGLVQPGGSLRLSCAASGFTFSAYEMDWVRQAPGKGLEWVSSISQRGEFTYYADSVKGRFTISRDNSKNTLYLQMNSLRAEDTAVYYCAKSGTGFDYWGQGTLVTVSS

SEQ ID NO: 2138 - protein, 116 aa, Homo sapiens
EVQLLESGGGLVQPGGSLRLSCAASGFTFASHEMDWVRQAPGKGLEWVSAISGSGGSTYYADSVKGRFTISRDNSKNTLYLQMNSLRAEDTAVYYCAKAGDPFDYWGQGTLVTVSS

SEQ ID NO: 2139 - protein, 116 aa, Homo sapiens
EVQLLESGGGLVQPGGSLRLSCAASGFTFESTDMDWVRQAPGKGLEWVSTIGRSGLDTYYADSVKGRFTISRDNSKNTLYLQMNSLRAEDTAVYYCAKAYDPFDYWGQGTLVTVSS

SEQ ID NO: 2140 - protein, 116 aa, Homo sapiens
EVQLLESGGGLVQPGGSLRLSCAASGFTFMDSDMDWVRQAPGKGLEWVSTISPSGELTYYADSVKGRFTISRDNSKNTLYLQMNSLRAEDTAVYYCAKAYSPFDYWGQGTLVTVSS

SEQ ID NO: 2141 - protein, 123 aa, Homo sapiens
EVQLLESGGGLVQPGGSLRLSCAASGFTFENYDMMWVRQAPGKGLEWVSTITHHGIITYYADSVKGRFTISRDNSKNTLYLQMNSLRAEDTAVYYCAKEEDWTFLKTVVFDYWGQGTLVTVSS

SEQ ID NO: 2142 - protein, 117 aa, Homo sapiens
EVQLLESGGGLVQPGGSLRLSCAASGFTFGGYDMSWVRQAPGKGLEWVSSIDGVGPHTYYADSVKGRFTISRDNSKNTLYLQMNSLRAEDTAVYYCAKGFGLGFDYWGQGTLVTVSS

SEQ ID NO: 2143 - protein, 116 aa, Homo sapiens
EVQLLESGGGLVQPGGSLRLSCAASGFTFELEEMDWVRQAPGKGLEWVSSISGSGGSTYYADSVKGRFTISRDNSKNTLYLQMNSLRAEDTAVYYCAKAYTGFDYWGQGTLVTVSS

SEQ ID NO: 2144 - protein, 116 aa, Homo sapiens
EVQLLESGGGLVQPGGSLRLSCAASGFTFEDTEMDWVRQAPGKGLEWVSSISGNGNSTYYADSVKGRFTISRDNSKNTLYLQMNSLRAEDTAVYYCAKAFTPFDYWGQGTLVTVSS

SEQ ID NO: 2145 - protein, 116 aa, Homo sapiens
EVQLLESGGGLVQPGGSLRLSCAASGFTFPDAEMDWVRQAPGKGLEWVSTISDSGVHTYYADSVKGRFTISRDNSKNTLYLQMNSLRAEDTAVYYCAKAGTSFDYWGQGTLVTVSS

SEQ ID NO: 2146 - protein, 116 aa, Homo sapiens
EVQLLESGGGLVQPGGSLRLSCAASGFTFDNSEMDWVRQAPGKGLEWVSTISGKGSTTYYADSVKGRFTISRDNSKNTLYLQMNSLRAEDTAVYYCAKAGTGFDYWGQGTLVTVSS

SEQ ID NO: 2147 - protein, 116 aa, Homo sapiens
EVQLLESGGGLVQPGGSLRLSCAASGFTFQSSEMDWVRQAPGKGLEWVSTIGSSGDDTYYADSVKGRFTISRDNSKNTLYLQMNSLRAEDTAVYYCAKAFTSFDYWGQGTLVTVSS

SEQ ID NO: 2148 - protein, 116 aa, Homo sapiens
EVQLLESGGGLVQPGGSLRLSCAASGFTFPHSEMDWVRQAPGKGLEWVSSISGGGDTTYYADSVKGRFTISRDNSKNTLYLQMNSLRAEDTAVYYCAKAGTGFDYWGQGTLVTVSS

SEQ ID NO: 2149 - protein, 117 aa, Homo sapiens; identical to SEQ ID NO: 2142

SEQ ID NO: 2150 - protein, 116 aa, Homo sapiens
EVQLLESGGGLVQPGGSLRLSCAASGFTFGWYDMMWVRQAPGKGLEWVSGITFDGHSTYYADSVKGRFTISRDNSKNTLYLQMNSLRAEDTAVYYCAKEGVNFDYWGQGTLVTVSS

SEQ ID NO: 2151 - protein, 116 aa, Homo sapiens; identical to SEQ ID NO: 2139

SEQ ID NO: 2152 - protein, 116 aa, Homo sapiens
EVQLLESGGGLVQPGGSLRLSCAASGFTFYDYEMDWVRQAPGKGLEWVSTISATGDSTYYADSVKGRFTISRDNSKNTLYLQMNSLRAEDTAVYYCAKAYTSFDYWGQGTLVTVSS

SEQ ID NO: 2153 - protein, 116 aa, Homo sapiens
EVQLLESGGGLVQPGGSLRLSCAASGFTFKDYEMDWVRQAPGKGLEWVSAITPDGQTTYYADSVKGRFTISRDNSKNTLYLQMNSLRAEDTAVYYCAKAGTSFDYWGQGTLVTVSS

SEQ ID NO: 2154 - protein, 116 aa, Homo sapiens
EVQLLESGGGLVQPGGSLRLSCAASGFTFSDYEMDWVRQAPGKGLEWVSSIDNSGFSTYYADSVKGRFTISRDNSKNTLYLQMNSLRAEDTAVYYCAKAFSTFDYWGQGTLVTVSS

SEQ ID NO: 2155 - protein, 116 aa, Homo sapiens
EVQLLESGGGLVQPGGSLRLSCAASGFTFTNYEMDWVRQAPGKGLEWVSTINPTGQSTYYADSVKGRFTISRDNSKNTLYLQMNSLRAEDTAVYYCAKAFTPFDYWGQGTLVTVSS

SEQ ID NO: 2156 - protein, 116 aa, Homo sapiens
EVQLLESGGGLVQPGGSLRLSCAASGFTFANYEMDWVRQAPGKGLEWVSTISKMGADTYYADSVKGRFTISRDNSKNTLYLQMNSLRAEDTAVYYCAKAWSGFDYWGQGTLVTVSS

SEQ ID NO: 2157 - protein, 116 aa, Homo sapiens
EVQLLESGGGLVQPGGSLRLSCAASGFTFDNSEMDWVRQAPGKGLEWVSTISVHGADTYYADSVKGRFTISRDNSKNTLYLQMNSLRAEDTAVYYCAKAGTSFDYWGQGTLVTVSS

SEQ ID NO: 2158 - protein, 116 aa, Homo sapiens
EVQLLESGGGLVQPGGSLRLSCAASGFTFEMSEMDWVRQAPGKGLEWVSAISGSGGSTYYADSVKGRFTISRDNSKNTLYLQMNSLRAEDTAVYYCAKAGTPFDYWGQGTLVTVSS

SEQ ID NO: 2159 - protein, 116 aa, Homo sapiens
EVQLLESGGGLVQPGGSLRLSCAASGFTFKGSEMDWVRQAPGKGLEWVSTISADGRETYYADSVKGRFTISRDNSKNTLYLQMNSLRAEDTAVYYCAKSYTSFDYWGQGTLVTVSS

SEQ ID NO: 2160 - protein, 116 aa, Homo sapiens
EVQLLESGGGLVQPGGSLRLSCAASGFTFSIYEMDWVRQAPGKGLEWVSTISASGDTTYYADSVKGRFTISRDNSKNTLYLQMNSLRAEDTAVYYCAKAGSPFDYWGQGTLVTVSS

SEQ ID NO: 2161 - protein, 116 aa, Homo sapiens
EVQLLESGGGLVQPGGSLRLSCAASGFTFEMYEMDWVRQAPGKGLEWVSSIDLAGLHTYYADSVKGRFTISRDNSKNTLYLQMNSLRAEDTAVYYCAKAGTGFDYWGQGTLVTVSS

SEQ ID NO: 2162 - protein, 116 aa, Homo sapiens
EVQLLESGGGLVQPGGSLRLSCAASGFTFSHYEMDWVRQAPGKGLEWVSTIGRGGTNTYYADSVKGRFTISRDNSKNTLYLQMNSLRAEDTAVYYCAKGGTGFDYWGQGTLVTVSS

SEQ ID NO: 2163 - protein, 116 aa, Homo sapiens
EVQLLESGGGLVQPGGSLRLSCAASGFTFDSYEMDWVRQAPGKGLEWVSTIHPTGMNTYYADSVKGRFTISRDNSKNTLYLQMNSLRAEDTAVYYCAKAGNGFDYWGQGTLVTVSS

SEQ ID NO: 2164 - protein, 116 aa, Homo sapiens; identical to SEQ ID NO: 2161

SEQ ID NO: 2165 - protein, 116 aa, Homo sapiens
EVQLLESGGGLVQPGGSLRLSCAASGFTFPDVEMDWVRQAPGKGLEWVSSIDTSGGLTYYADSVKGRFTISRDNSKNTLYLQMNSLRAEDTAVYYCAKSYSPFDYWGQGTLVTVSS

SEQ ID NO: 2166 - protein, 116 aa, Homo sapiens
EVQLLESGGGLVQPGGSLRLSCAASGFTFESAEMDWVRQVPGKGLEWVSTISPSGHGTYYADSVKGRFTISRDNSKNTLYLQMNSLRAEDTAVYYCAKSGSGFDYWGQGTLVTVSS

SEQ ID NO: 2167 - protein, 116 aa, Homo sapiens; identical to SEQ ID NO: 2131

SEQ ID NO: 2168 - protein, 116 aa, Homo sapiens
EVQLLESGGGLVQPGGSLRLSCAASGFTFGDYQMDWVRQAPGKGLEWVSTINENGTMTYYADSVKGRFTISRDNSKNTLYLQMNSLRAEDTAVYYCAKAYSGFDYWGQGTLVTVSS

SEQ ID NO: 2169 - protein, 116 aa, Homo sapiens
EVQLLESGGGLVQPGGSLRLSCAASGFTFSSYGMDWVRQAPGKGLEWVSSISSDGLNTYYADSVKGRFTISRDNSKNTLYLQMNSLRAEDTAVYYCAKFYDPFDYWGQGTLVTVSS

SEQ ID NO: 2170 - protein, 116 aa, Homo sapiens
EVQLLESGGGLVQPGGSLRLSCAASGFTFKSYGMDWVRQAPGKGLEWVSAIGPTGRDTYYADSVKGRFTISRDNSKNTLYLQMNSLRAEDTAVYYCAKEYTPFDYWGQGTLVTVSS

SEQ ID NO: 2171 - protein, 116 aa, Homo sapiens
EVQLLESGGGLVQPGGSLRLSCAASGFTFDEYGMDWVRQAPGKGLEWVSTISPNGQSTYYADSVKGRFTISRDNSKNTLYLQMNSLRVEDTAVYYCAKEYDSFDYWGQGTLVTVSS

SEQ ID NO: 2172 - protein, 116 aa, Homo sapiens
EVQLLESGGGLVQPGGSLRLSCAASGFTFSDYDMDWVRQAPGKGLEWVSTIEGRGRKTYYADSVKGRFTISRDNSKNTLYLQMNSLRAEDTAVYYCAKAFTNFDYWGQGTLVTVSS

SEQ ID NO: 2173 - protein, 116 aa, Homo sapiens
EVQLLESGGGLVQPGGSLRLSCAASGFTFSWYDMDWVRQAPGKGLEWVSTITSHGIDTYYADSVKGRFTISRDNSKNTLYLQMNSLRAEDTAVYYCAKAFDPFDYWGQGTLVTVSS

SEQ ID NO: 2174 - protein, 116 aa, Homo sapiens
EVQLLESGGGLVQPGGSLRLSCAASGFTFDREEMDWVRQAPGKGLEWVSTILPSGRKTYYADSVKGRFTISRDNSKNTLYLQMNSLRAEDTAVYYCAKAYTGFRYWGQGTLVTVSS

SEQ ID NO: 2175 - protein, 116 aa, Homo sapiens
EVQLLESGGGLVQPGGSLRLSCAASGFTFDREEMDWVRQAPGKGREWVSTISPRGRTTYYADSVRGRFTISRDNSKNMLYLQMNGLRAEDTAVYYCAKAYTGFKYWGQGTLVTVSS

SEQ ID NO: 2176 - protein, 116 aa, Homo sapiens
EVQLLESGGGLVQPGGSLRLSCAASGFTFRDYEMDWVRQAPGKGREWVSSIGPSGSETWYADSVKGRFTISRDNSKNTLYLQMNSLRAEDTAVYYCAKAYTGFGYWGQGTLVTVSS

SEQ ID NO: 2177 - protein, 116 aa, Homo sapiens
EVQLLESGGGLVQPGGSLRLSCAASGFTFRDYEMDWIRQAPGKGLEWVSSIGPSGSFTRYADSVKGRFTISRDNSKNTLYLQMNSLRAEDTAVYYCAKAYTGFRYWGQGTLVTVSS

SEQ ID NO: 2178 - protein, 116 aa, Homo sapiens
EVQLLESGGGLVQPGGSLRLSCAASGFTFNLYSMDWVRQAPGKGLEWVSTIDRNGERTYYADSVKGRFTISRDNSKNTLYLQMNSLRAEDTAVYYCAKAFDGFDYWGQGTLVTVSS

SEQ ID NO: 2179 - protein, 120 aa, Homo sapiens
EVQLLESGGGLVQPGGSLRLSCAASGFTFKDYDMMWVRQAPGKGLEWVSSISDWGRRTYYADSVKGRFTISRDNSKNTLYLQMNSLRAEDTAVYYCAKEAAWAEGSFDYWGQGTLVTVSS

SEQ ID NO: 2180 - protein, 119 aa, Homo sapiens
EVQLLESGGGLVQPGGSLRLSCAASGFTFALYDMSWVRQAPGKGLEWVSTITPLGSPTYYADSVKGRFTISRDDSKNTLYLQMNSLRAEDTAVYYCAKVHSVENEFDYWGQGTLVTVSS

SEQ ID NO: 2181 - protein, 116 aa, Homo sapiens; identical to SEQ ID NO: 2130

SEQ ID NO: 2182 - protein, 116 aa, Homo sapiens; identical to SEQ ID NO: 2157

SEQ ID NO: 2183 - protein, 116 aa, Homo sapiens
EVQLLESGGGLVQPGGSLRLSCAASGFTFQDTEMDWVRQAPGKGLEWVSTIGPSGTSTYYADSVKGRFTISRDNSKNTLYLQMNSLRAEDTAVYYCAKSYSGFDYWGQGTLVTVSS

SEQ ID NO: 2184 - protein, 116 aa, Homo sapiens
EVQLLESGGGLVQPGGSLRLSCAASGFTFNDYEMDWVRQAPGKGLEWVSSISTNGMHTYYADSVKGRFTISRDNSKNTLYLQMNSLRAEDTAVYYCAKAFDPFDYWGQGTLVTVSS

SEQ ID NO: 2185 - protein, 116 aa, Homo sapiens
EVQLLESGGGLVQPGGSLRLSCAASGFTFSDHEMDWVRQAPGKGLEWVSSISPAGMSTYYADSVKGRFTISRDNSKNTLYLQMNSLRAEDTAVYYCAKGGDPFDYWGQGTLVTVSS

SEQ ID NO: 2186 - protein, 116 aa, Homo sapiens
EVQLLESGGGLVQPGGSLRLSCAASGFTFSRDEMDWVRQAPGKGLEWVSTIDGHGLRTYYADSVKGRFTISRDNSKNTLYLQMNSLRAEDTAVYYCAKAGSGFDYWGQGTLVTVSS

SEQ ID NO: 2187 - protein, 116 aa, Homo sapiens
EVQLLESGGGLVQPGGSLRLSCAASGFTFEKYEMDWVRQAPGKGLEWVSTISPDGMVTYYADSVKGRFTISRDNSKNTLYLQMNSLRAEDTAVYYCAKAASGFDYWGQGTLVTVSS

SEQ ID NO: 2188 - protein, 116 aa, Homo sapiens
EVQLLESGGGLVQPGGSLRLSCAASGFTFESAEMDWVRQAPGKGLEWVSAIERDGTTTYYADSVKGRFTISRDNSKNMLYLQMNSLRAEDTAVYYCAKAGTPFDYWGQGTLVTVSS

SEQ ID NO: 2189 - protein, 116 aa, Homo sapiens
EVQLLESGGGLVQPGGSLRLSCAASGFTFPESEMDWVRQAPGKGLEWVSTISPPGNLTYYADSVKGRFTISRDNSKNTLYLQMNSLRAEDTAVYYCAKAGEGFDYWGQGTLVTVSS

SEQ ID NO: 2190 - protein, 116 aa, Homo sapiens
EVQLLESGGGLVQPGGSLRLSCAASGFTFAGMEMDWVRQAPGKGLEWVSTISPGGQDTYYADSVKGRFTISRDNSKNTLYLQMNSLRAEDTAVYYCAKAGAPFDYWGQGTLVTVSS

SEQ ID NO: 2191 - protein, 116 aa, Homo sapiens
EVQLLESGGGLVQPGGSLRLSCAASGFTFAWYEMDWVRQAPGKGLEWVSTINNSGTKTYYADSVKGRFTISRDNSKNTLYLQMNSLRAEDTAVYYCAKAGEGFDYWGQGTLVTVSS

SEQ ID NO: 2192 - protein, 123 aa, Homo sapiens; identical to SEQ ID NO: 2141

SEQ ID NO: 2193 - protein, 116 aa, Homo sapiens
EVQLLESGGGLVQPGGSLRLSCAASGFTFAGYSMDWVRQAPGKGLEWVSTISPRGGGTYYADSVKGRFTISRDNSKNTLYLQMNSLRAEDTAVYYCAKEGTGFAYWGQGTLVTVSS

SEQ ID NO: 2194 - protein, 116 aa, Homo sapiens
EVQLLESGGGLVQPGGSLRLSCAASGFTFRRYDMDWVRQAPGKGLEWVSSITGSGAMTYYADSVKGRFTISRDNSKNTLYLQMNSLRAEDTAVYYCAKAGTGFDYWGQGTLVTVSS

SEQ ID NO: 2195 - protein, 116 aa, Homo sapiens
EVQLLESGGGLVQPGGSLRLSCAASGFTFGDYQMDWVRQAPGKGLEWVSSITGSGAMTYYADSVKGRFTISRDNSKNTLYLQMNSLRAEDTAVYYCAKAYTGFDYWGQGTLVTVSS

SEQ ID NO: 2196 - protein, 116 aa, Homo sapiens
EVQLLESGGGLVQPGGSLRLSCAASGFTFDREEMDWVRQAPGKGLEWVSTISPSGRKTYYADSVKGRFTISRDNSKNTLYLQMNSLRAEDTAVYYCAKHGTGFDYWGQGTLVTVSS

SEQ ID NO: 2197 - protein, 116 aa, Homo sapiens
EVQLLESGGGLVQPGGSLRLSCAASGFTFRDYEMDWVRQAPGKGLEWVSSIGPSGSETYYADSVKGRFTISRDNSKNTLYLQMNSLRAEDTAVYYCAKAYTSFDYWGQGTLVTVSS

SEQ ID NO: 2198 - protein, 116 aa, Homo sapiens
EVQLLESGGGLVQPGGSLRLSCAASGFTFSSYEMDWVRQAPGKGLEWVSTISADGVTTYYADSVKGRFTISRDNSKNTLYLQMNSLRAEDTAVYYCAKAFDAFDYWGQGTLVTVSS

SEQ ID NO: 2199 - protein, 116 aa, Homo sapiens
EVQLLESGGGLVQPGGSLRLSCAASGFTFDKSEMDWVRQAPGKGLEWVSTIDSKGLRTYYADSVKGRFTISRDNSKNTLYLQMNSLRAEDTAVYYCAKAFAGFDYWGQGTLVTVSS

SEQ ID NO: 2200 - protein, 116 aa, Homo sapiens
EVQLLESGGGLVQPGGSLRLSCAASGFTFFDYEMDWVRQAPGKGLEWVSTISRNGMVTYYADSVKGRFTISRDNSKNTLYLQMNSLRAEDTAVYYCAKAGTPFDYWGQGTLVTVSS

SEQ ID NO: 2201 - protein, 116 aa, Homo sapiens
EVQLLESGGGLVQPGGSLRLSCAASGFTFKDYEMDWVRQAPGKGLEWVSTIDSKGLRTYYADSVKGRFTISRDNSKNTLYLQMNSLRAEDTAVYYCAKAFAGFDYWGQGTLVTVSS

SEQ ID NO: 2202 - protein, 116 aa, Homo sapiens
EVQLLESGGGLVQPGGSLRLSCAASGFTFRDYEMDWVRQAPGKGLEWVSSIGPSGSETYYADSVKGRFTISRDNSKDTLYLQMNSLRAEDTAVYYCAKSGTGFDYWGQGTLVTVSS

SEQ ID NO: 2203 - protein, 116 aa, Homo sapiens
EVQLLESGGGLVQPGGSLRLSCAASGFTFAQYEMDWVRQAPGKGLEWVSSISHNGRHAYYADSVKGRFTISRDNSKNTLYLQMNSLRAEDTAVYYCAKSGDGFDYWGQGTLVTVSS

SEQ ID NO: 2204 - protein, 116 aa, Homo sapiens
EVQLLESGGGLVQPGGSLRLSCAASGFTFEWFEMDWVRQAPGKGLEWVSTISMGGDNTYYADSVKGRFTISRDNSKNTLYLQMNSLRAEDTAVYYCAKAGSAFDYWGQGTLVTVSS

SEQ ID NO: 2205 - protein, 116 aa, Homo sapiens
EVQLLESGGGLVQPGGSLRLSCAASGFTFMKYEMDWVRQAPGKGLEWVSSISSSGGSTYYADSVKGRFTISRDNSKNTLYLQMNSLRAEDTAVYYCAKSFTPFDYWGQGTLVTVSS

SEQ ID NO: 2206 - protein, 116 aa, Homo sapiens
EVQLLESGGGLVQPGGSLRLSCAASGFTFGHYEMDWVRQAPGKGLEWVSTISPNGITTYYADSVKGRFTISRDNSKNTLYLQMNSLRAEDTAVYYCAKASSGFDYWGQGTLVTVSS

SEQ ID NO: 2207 - protein, 116 aa, Homo sapiens
EVQLLESGGGLVQPGGSLRLSCAASGFTFPSYEMDWVRQAPGKGLEWVSSISPTGDRTYYADSVKGRFTISRDNSKNTLYLQMNSLRAEDTAVYYCAKSGTSFDYWGQGTLVTVSS

SEQ ID NO: 2208 - protein, 116 aa, Homo sapiens
EVQLLESGGGLVQPGGSLRLSCAASGFTFRDYEMDWVRQAPGKGLEWVSTISPSGRSTYYADSVKGRFTISRDNSKNTLYLQMNSLRAEDTAVYYCAKAYTGFRYWGQGTLVTVSS

SEQ ID NO: 2209 - protein, 108 aa, Homo sapiens
DIQMTQSPSSLSASVGDRVTITCRASKAIMGDLAWYQQKPGKAPKLLIGGGSVLQSGVPSRFSGSGSGTDFTLTISSLQPEDFATYYCRQGAMGSYTFGQGTKVEIKR

SEQ ID NO: 2210 - protein, 108 aa, Homo sapiens
DIQMTQSPSSLSASVGDRVTITCRASHFIAHGLSWYQQKPGKAPKLLISGVSVLQSGVPSRFSGSGSGTDFTLTISSLQPEDFATYYCRQGAMGSYTFGQGTKVEIKR

SEQ ID NO: 2211 - protein, 108 aa, Homo sapiens
DIQMTQSPSSLSASVGDRVTITCRASSPITDGLAWYQQKPGKAPKLLIDTGSRLQSGVPSRFSGSGSGTDFTLTISSLQPEDFATYYCRQGAMGSYTFGQGTKVEIKR

SEQ ID NO: 2212 - protein, 108 aa, Homo sapiens
DIQMTQSPSSLSASVGDRVTITCRASSVILNELHWYQQKPGKAPKLLISAVSRLQSGVPSRFSGSGSGTDFTLTISSLQPEDFATYYCLQTFWGPFTFGQGTKVEIKR

SEQ ID NO: 2213 - protein, 108 aa, Homo sapiens
DIQMTQSPSSLSASVGDRVTITCRASQPIENKLKWYQQKPGKAPKLLIYKTSYLQSGVPSRFSGSGSGTDFTLTISSLQPEDFATYYCQQNRQRPHTFGQGTKVEIKR

SEQ ID NO: 2214 - protein, 108 aa, Homo sapiens
DIQMTQSPSSLSASVGDRVTITCRASQGIQNNLNWYQQKPGKAPKLLIYRTSNLQSGVPSRFSGSGSGTDFTLTISSLQPEDFAAYYCQQTSARPYTFGQGTRVKIKR

SEQ ID NO: 2215 - protein, 108 aa, Homo sapiens
DIQMTQSPSSLSASVGDRVTITCRASSVIEDTLSWYQQKPGKAPKLLISGPSGLQSGVPSRFSGSGSGTDFTLTISSLQPEDFATYYCRQGAMGSYTFGQGTKVEIKR

SEQ ID NO: 2216 - protein, 108 aa, Homo sapiens
DIQMTQSPSSLSASVGDRVTITCRASREIIEPLVWYQQKPGKAPKLLIGVSSALQSGVPSRFSGSGSGTDFTLTISGLQPEDFATYYCRQGAMGSYTFGQGTKVEIKR

SEQ ID NO: 2217 - protein, 108 aa, Homo sapiens
DIQMTQSPSSLSASVGDRVTITCRASLVIDSELAWYQQKPGKAPKLLIGGVSGLQSGVPSRFSGSGSGTDFTLTISSLQPEDFATYYCRQGAMGSYTFGQGTKVEIKR

SEQ ID NO: 2218 - protein, 108 aa, Homo sapiens
DIQMTQSPSSLSASVGDRVTITCRASMMIDKELAWYQQKPGKAPKLLIVGGSGLQSGVPSRFSGSGSGTDFTLTISSLQPEDFATYYCRQGAMGSYTFGQGTKVEIKR

SEQ ID NO: 2219 - protein, 108 aa, Homo sapiens
DIQMTQSPSSLSASVGDRVTITCRASIPINEQLVWYQQKPGKAPMLLIGGGSRLQSGVPSRFSGSGSGTDFTLTISSLQPEDFATYYCRQGAVGSYTFGQGTKVEIKR

SEQ ID NO: 2220 - protein, 108 aa, Homo sapiens
DIQMTQSPSSLSASVGDRVTITCRASQSISSYLNWYQQKPGKAPKLLIYAASSLQSGVPSRFSGSGSGTDFTLTISSLQPEDFATYYCQQSYSTPNTFGQGTKVEIKR

SEQ ID NO: 2221 - protein, 108 aa, Homo sapiens
DIQMTQSPSSLSASVGDRVTITCRASNQIREPLSWYQQKPGKAPKLLIGGGSRLQSGVPSRFSGSGSGTDFTLTISSLQPEDFATYYCRQGAMGSYTFGQGTKVEIKR

SEQ ID NO: 2222 - protein, 108 aa, Homo sapiens
DIQMTQSPSSLSASVGDRVTITCRASKVIADDLVWYQQKPGKAPKLLIGSLSGLQSGVPSRFSGSGSGTDFTLTISSLQPEDFATYYCRQGAMGSYTFGQGTKVEIKR

SEQ ID NO: 2223 - protein, 108 aa, Homo sapiens; identical to SEQ ID NO: 2216

SEQ ID NO: 2224 - protein, 108 aa, Homo sapiens; identical to SEQ ID NO: 2218

SEQ ID NO: 2225 - protein, 108 aa, Homo sapiens
DIQMTQSPSSLSASVGDRVTITCRASTTIDTELSWYQQKPGKAPKLLISGYSVLQSGVPSRFSGSGSGTDFTLTISSLQPEDFATYYCRQGAMGSYTFGQGTKVEIKR

SEQ ID NO: 2226 - protein, 108 aa, Homo sapiens
DIQMTQSPSSLSASVGDRVTITCRASSWIADDLSWYQQKPGKAPKLLIGGVSGLQSGVPSRFSGSGSGTDFTLTISSLQPEDFATYYCRQGLLGSYTFGQGTKVEIKR

SEQ ID NO: 2227 - protein, 108 aa, Homo sapiens
DIQMTQSPSSLSASVGDRVTITCRASRNIDENLDWYQQKPGKAPKLLIRWGSRLQSGVPSRFSGSGSGTDFTLTISSLQPEDFATYYCRQGLFGSWTFGQGTKVEIKR

SEQ ID NO: 2228 - protein, 108 aa, Homo sapiens
DIQMTQSPSSLSASVGDRVTITCRASRSIEGELFWYQQKPGKAPKLLIRGASVLQSGVPSRFSGSGSGTDFTLTISSLQPEDFATYYCRQGRYGSFTFGQGTKVEIKR

SEQ ID NO: 2229 - protein, 108 aa, Homo sapiens
DIQMTQSPSSLSASVGDRVTITCRASQAIPWGLNWYQQKPGKAPKLLIYDVSSLQSGVPSRFSGSGSGTDFTLTISSLQPEDFATYYCQQDIHIPMTFGQGTKVEIKR

SEQ ID NO: 2230 - protein, 108 aa, Homo sapiens
DIQMTQSPSSLSASVGDRVTITCRASQHIGRWLSWYQQKPGKAPKLLIYRASTLQSGVPSRFSGSGSGTDFTLTISSLQPEDFATYYCQQDFGDPYTFGQGTKVGIKR

SEQ ID NO: 2231 - protein, 108 aa, Homo sapiens
DIQMTQSPSSLSASVGDRVTITCRASQNIFADLNWYQQKPGKAPKLLIYMGSRLQSGVPSRFSGSGSGTDFTLTISSLQPEDFATYYCQQDYKFPLTFGQGTKVEIKR

SEQ ID NO: 2232 - protein, 108 aa, Homo sapiens
DIQMTQSPSSLSASVGDRVTITCRASSDIGRMLSWYQQKPGKAPKLLIVGGSSLQSGVPSRFSGSGSGTDFTLTISSLQPEDFATYYCWQWAKPPTTFGQGTKVEIKR

SEQ ID NO: 2233 - protein, 108 aa, Homo sapiens; identical to SEQ ID NO: 2212

SEQ ID NO: 2234 - protein, 108 aa, Homo sapiens; identical to SEQ ID NO: 2231

SEQ ID NO: 2235 - protein, 108 aa, Homo sapiens; identical to SEQ ID NO: 2213

SEQ ID NO: 2236 - protein, 108 aa, Homo sapiens
DIQMTQSPSSLSASVGDRVTITCRASPNIAVDLAWYQQKPGKAPKLLIRGVSRLQSGVPSRFSGSGSGTDFTLTISSLQPEDFATYYCRQGAMGSYTFGQGTKVEIKR

SEQ ID NO: 2237 - protein, 108 aa, Homo sapiens
DIQMTQSPSSLSASVGDRVTITCRASQNIAKKLAWYQQKPGKAPKLLIVGASLLQSGVPSRFSGSGSGTDFTLTISSLQPEDFATYYCRQGAMGSYTFGQGTKVEIKR

SEQ ID NO: 2238 - protein, 108 aa, Homo sapiens
DIQMTQSPSSLSASVGDRVTITCRASQDIDMYLNWYQQKPGKAPKLLIYRGSQLQSRVPSRFSGSGSGTDFTLTISSLQPEDLATYYCQQLASYPVTFGQGTKVEIKR

SEQ ID NO: 2239 - protein, 108 aa, Homo sapiens
DIQMTQSPSSLSASVGDRVTITCRASQSISSYLNWYQQKPGQAPKLLIAAASFLQSGVPSRFSGSGSGTDFTLTISSLQPEDFATYYCGQGARGPTTFGQGTRVEIKR

SEQ ID NO: 2240 - protein, 108 aa, Homo sapiens
DIQMTQSPSSLSASVGDRVTITCRASSVILNELHWYQQKPGKAPKLLISAVSRLQSGVPSRFSGSGSGTDFTLTISSLQPEDFATYYCLQTFWGPYTFGQGTKVEIKR

SEQ ID NO: 2241 - protein, 116 aa, Homo sapiens
EVQLLESGGGLVQPGGSLRLSCAASGFTFDREEMDWVRQAPGKGLEWVSTISPSGRKTYYADSVKGRFTISRDNSKNTLYLQMNSLRAEDTAVYYCAKAYTGFDYWGQGTLVTVSS

SEQ ID NO: 2242 - protein, 116 aa, Homo sapiens
EVQLLESGGGLVQPGGSLRLSCAASGFTFRDYEMDWVRQAPGKGLEWVSTISADGRETYYADSVKGRFTISRDNSKNTLYLQMNSLRAEDTAVYYCAKAYTSFDYWGQGTLVTVSS

SEQ ID NO: 2243 - protein, 116 aa, Homo sapiens
EVQLLESGGGLVQPGGSLRLSCAASGFTFKGSEMDWVRQAPGKGLEWVSTISADGRETYYADSVKGRFTISRDNSKNTLYLQMNSLRAEDTAVYYCAKAYTSFDYWGQGTLVTVSS

SEQ ID NO: 2244 - protein, 116 aa, Homo sapiens
EVQLLESGGGLVQPGGSLRLSCAASGFTFDSYEMDWVRQAPGKGLEWVSTISPSGRKTYYADSVKGRFTISRDNSKNTLYLQMNSLRAKDTAVYYCAKAGTSFDYWGQGTLVTVSS

SEQ ID NO: 2245 - protein, 116 aa, Homo sapiens; identical to SEQ ID NO: 2243

SEQ ID NO: 2246 - protein, 116 aa, Homo sapiens
EVQLLESGGGLVQPGGSLRLSCAASGFTFSSYEMDWVRRAPGKGLEWVSTISADGRETYYADSVKGRFTISRDNSKNTLYLQMNSLRAGDTAVYYCAKAFDAFDHWGQGTLVTVSS

SEQ ID NO: 2247 - protein, 116 aa, Homo sapiens
EVQLLESGGGLVQPGGSLRLSCAASGFTFELGEMDWVRQAPGKGLEWVSSISGSGGSTYYADSVKGRFTISRDNSKNTLYLQMNSLRAEDTAVYYCAKAYTGFDYWGQGTLVTVSS

SEQ ID NO: 2248 - protein, 116 aa, Homo sapiens
EVQLLESGGGLVQPGGSLRLSCAASGFTFELEEMDWVRQAPGKGLEWVSSISGSGGSTYYADSVKGRFTTSRDNSKNTLYLQMNSLRAEDTAVYYCAKAYTGFDYWGQGTLVTVSS

SEQ ID NO: 2249 - protein, 116 aa, Homo sapiens
EVQLLESGGGLVQPGGSLRLSCAASGFTFDREEMDWVRQAPGKGLEWVSTISPSGRKTYYADSVKGRFTISRDNSKNTLYLQMNSLRAEDTAVYYCAKAYDPFDYWGQGTLVTVSS

SEQ ID NO: 2250 - protein, 116 aa, Homo sapiens
EVQLLESGGGLVQPGGSLRLSCAASGFTFDREEMDWVRQAPGKGLEWVSTISPSGRKTYYADSVKGRFTISRDNSKNTLYLQMNSLRAEDTAVYYCAKQGTGFDYWGQGTLVTVSS

SEQ ID NO: 2251 - protein, 116 aa, Homo sapiens
EVQLLESGGGLVQPGGSLRLSCAASGFTFRDYEMDWVRQAPGKGLEWVSSIGPSGSETYYADSVKGRFTISRDNSTNTLYLQMNSLRAEDTAVYYCAKSYTSFDYWGQGTLVTVSS

SEQ ID NO: 2252 - protein, 116 aa, Homo sapiens
ELQLLESGGGLVQPGGSLRLSCAASGFTFRDYEMDWVRQAPGKGLEWVSSIGPSGSETYYADSVKGRFTISRDNSKNTLYLQMNSLRAEDTAVYYCAKAYTSFDYWGQGTLVTVSS

SEQ ID NO: 2253 - protein, 116 aa, Homo sapiens
EVQLLESGGGLVQPGGSLRLSCAASGFTFSSYEMDWVRQAPGKGLEWVSTISADGVTTYYTDSVKGRFTISRDNSKNTLYLQMNSLRAEDTAVYYCAKAFDAFDYWGQGTLVTVSS

SEQ ID NO: 2254 - protein, 116 aa, Homo sapiens
EVQLLESGGGLVQPGGSLRLSCAASGFTFDREEMDWVRQAPGKGLEWVSTISPRGRGTYYADSVKGRFTISRDNSKNTLYLQMNSLRAEDTAVYYCAKAYTGFRYWGQGTLVTVSS

SEQ ID NO: 2255 - protein, 116 aa, Homo sapiens
EVQLLESGGGLVQPGGSLRLSCAASGFTFDREEMDWVRQAPGKGLEWVSTISPLGRSTYYADSVKGRFTISRDNSKNTLYLQMNSLRAEDTAVYYCAKAYTGFRYWGQGTLVTVSS

SEQ ID NO: 2256 - protein, 116 aa, Homo sapiens
EVQLLESGGGLVQPGGSLRLSCAASGFTFRDYEMDWVRQAPGKGLEWVSSIGPSGSETYYADSVKGRFTISRDNSKNTLYLQMNSLRAEDTAVYYCAKAYTGFGYWGQGTLVTVSS

SEQ ID NO: 2257 - protein, 116 aa, Homo sapiens; identical to SEQ ID NO: 2174

SEQ ID NO: 2258 - protein, 116 aa, Homo sapiens
EVQLLESGGGLVQPGGSLRLSCAASGFTFRDYEMDWVRQAPGKGREWVSSIGPGGSETYYADSVKGRFTISRDNSKNTLYLQMNSLRAEDTAVYYCAKAYTGFKYWGQGTLVTVSS

SEQ ID NO: 2259 - protein, 116 aa, Homo sapiens
EVQLLESGGGLVQPGGSLRLSCAASGFTFRDYEMDWVRQAPGKGLEWVSTIHPSGRKTYYADSVKGRFTISRDNFKNTLYLQMNSLRAEDTAVYYCAKAYTGFGYWGQGTLVTVSS

SEQ ID NO: 2260 - protein, 116 aa, Homo sapiens
EVQLLESGGGLVQPGGSLRLSCAASGFTFRDYEMDWVRQAPGKGLEWVSSISPNGSETNYADSVKGRFTISRDNSKNTLYLQMNSLRAEDTAVYYCAKAYTSFDYWGQGTLVTVSS

SEQ ID NO: 2261 - protein, 116 aa, Homo sapiens; identical to SEQ ID NO: 2176

SEQ ID NO: 2262 - protein, 116 aa, Homo sapiens
EVQLLESGGGLVQPGGSLRLSCAASGFTFRDYEMDWVRQAPGKGLEWVSSIGPSGSETWYADSVKGRFTISRDNSKNTLYLQMNSLRAEDTAVYYCAKAYTGFGYWGQGTLVTVSS

SEQ ID NO: 2263 - protein, 116 aa, Homo sapiens; identical to SEQ ID NO: 2176

SEQ ID NO: 2264 - protein, 116 aa, Homo sapiens
EVQLLESGGGLVQPGGSLRLSCAASGFTFDREEMDWVRQAPGKGLEWVSTISPGGRKTYYADSVKGRFTISRDNSKNTLYLQMNSLRAEDTAVYYCAKAYTGFRYWGQGTLVTVSS

SEQ ID NO: 2265 - protein, 116 aa, Homo sapiens; identical to SEQ ID NO: 2264

SEQ ID NO: 2266 - protein, 116 aa, Homo sapiens
EVQLLQSGGGLVQPGGSLRLSCAASGFTFDREEMDWVRQAPGKGLEWVSTISPNGRTTYYADSVKGRFTISRDNSKNTLYLQMNSLRAEDTAVYYCAKAYTGFRYWGQGTLVTVSS

SEQ ID NO: 2267 - protein, 116 aa, Homo sapiens
EVQLLESGGGLVQPGGSLRLSCAASGFTFDREEMDWVRQAPGKGLEWVSTISPNGRKTYYADSVKGRFTISRDNSKNTLYLQMNSLRAEDTAVYYCAKAYTGFRYWGQGTLVTVSS

SEQ ID NO: 2268 - protein, 116 aa, Homo sapiens; identical to SEQ ID NO: 2175

SEQ ID NO: 2269 - protein, 116 aa, Homo sapiens
EVQLLESGGGLVQPGGSLRLSCAASGFTFDREEMDWVRQAPGKGLEWVSTISPSGRKTWYADSVKGRFTISRDNSKNTLYLQMNSLRAKDTAVYYCAKAYTGFRYWGQGTLVTVSS

SEQ ID NO: 2270 - protein, 116 aa, Homo sapiens
EVQLLESGGGLVQPGGSLRLSCAASGFTFDREEMDWVRQAPGKGLEWVSTISPAGRGTYYADSVKGRFTISRDNSKNTLYLQMNGLRAEDTAVYYCAKAYTGFGYWGQGTLVTVSS

SEQ ID NO: 2271 - protein, 116 aa, Homo sapiens; identical to SEQ ID NO: 2254

SEQ ID NO: 2272 - protein, 116 aa, Homo sapiens; identical to SEQ ID NO: 2175

SEQ ID NO: 2273 - protein, 116 aa, Homo sapiens; identical to SEQ ID NO: 2208

SEQ ID NO: 2274 - protein, 116 aa, Homo sapiens
EVQLLESGGGLVQPGGSMRLSCAASGFTFRDYEMDWVRQAPGKGREWVSSIGPSGSETWYADSVKGRFTISRDNSKNTLYLQMNSLRAEDTAVYYCAKAYTGFGYWGQGTLVTVSS

SEQ ID NO: 2275 - protein, 116 aa, Homo sapiens
EVQLLESGGGLVQPGGSLRLSCAASGFTFDREEMDWVRQAPGKGREWVSTISPSGRKTWYADSVKGRFTISRDNSKNTLYLQMNGLRAEDTAVYYCAKAYTGFRYWGQGTLVTVSS

SEQ ID NO: 2276 - protein, 116 aa, Homo sapiens; identical to SEQ ID NO: 2177

SEQ ID NO: 2277 - protein, 116 aa, Homo sapiens; identical to SEQ ID NO: 2176

SEQ ID NO: 2278 - protein, 116 aa, Homo sapiens
EVQLLESGGGLVQPGGSLRLSCAASGFTFRDYEMDWVRQAPGKGLEWVSTISPSGRRTYYADSVKGRFTISRDNSKNTLYLQMNSLRAEDTAVYYCAKAYTGFHYWGQGTLVTVSS

SEQ ID NO: 2279 - protein, 116 aa, Homo sapiens; identical to SEQ ID NO: 2177

SEQ ID NO: 2280 - protein, 108 aa, Homo sapiens; identical to SEQ ID NO: 2212

SEQ ID NO: 2281 - protein, 118 aa, Homo sapiens
EVQLLESGGGLVQPGGSLRLSCAASGFIFAWYDMGWARQAPGKGLEWVSSIDWRGDQTYYADSVKGRFTISRDNSKNTLYLQMNSLRAEDTAVYYCATAEDEPGYDYWGQGTLVTVSS

SEQ ID NO: 2282 - protein, 118 aa, Homo sapiens
EVQLLESGGGLVQPGGSLRLSCAASGFIFAWYDMGWARQAPGKGLEWVSSIDWKGGKTYYADSVKGRFTISRDNSKNTLYLQMNSLRAEDTAVYYCATAEDEPGYDYWGQGTLVTVSS

SEQ ID NO: 2283 - protein, 118 aa, Homo sapiens
GVQLLESGGGLVQPGGSLRLSCAASGFIFAWYDMGWVRQAPGKGLEWVSSIDWHGEVEYYADSVKGRFTISRDNSKNTLYLQMNSLRAEDTAVYYCATAEDEPGYDYWGQGTLVTVSS

SEQ ID NO: 2284 - protein, 118 aa, Homo sapiens
EVQLLESGGGLVQPGGSLRLSCAASGFIFAWYDMGWVRQAPGKGLEWVSSIDWHGKITYYADSVKGRFTISRDNSKNTLYLQMNSLRAEDTAVYYCATAEDEPGYDYWGQGTLVTVSS

SEQ ID NO: 2285 - protein, 118 aa, Homo sapiens
EVQLLESGGGLVQPGGSLRLSCAASGFIFAWYDMGWVRQAPGKGLEWVSSIDWKGMETYYADSVKGRFTISRDNSKNTLYLQMNSLRAEDTAVYYCATAEDEPGYDYWGQGTLVTVSS

SEQ ID NO: 2286 - protein, 118 aa, Homo sapiens
EVQLLESGGGLVQPGGSLRLSCAASGFAFAAYDMGWVRQAPGKGLEWVSSIDWKGMETYYADSVKGRFTISRDNSKNTLYLQMNSLRAEDTAVYYCATAEDEPGYDYWGQGTLVTVSS

SEQ ID NO: 2287 - protein, 118 aa, Homo sapiens
GVQLLESGGGLVQPGGSLRLSCAASGFIFAVYDMGWARQAPGKGLEWVSSINDGGNVTYYADSVKGRFTISRDNSKNTLYLQMNSLRAEDTAVYYCATAEDEPGYDYWGQGTLVTVSS

SEQ ID NO: 2288 - protein, 118 aa, Homo sapiens
GVQLLESGGGLVQPGGSLRLSCAASGFIFAVYDMGWARQAPGKGLEWVSSINDGGNVTYYADSVKGRFTISRDNSKNTLYLQMNSLRAEDTAVYYCATAEDEPGYDYRGQGTLVTVSS

SEQ ID NO: 2289 - protein, 118 aa, Homo sapiens
EVQLLESGGGLIQPGGSLRLSCAASGFIFAVYDMGWARQAPGKGLEWVSSINDGGNVTYYADSVKGRFTISRDNSKNTLYLQMNSLRAEDTAVYYCATAEDEPGYDYRGQGTLVTVSS

SEQ ID NO: 2290 - protein, 118 aa, Homo sapiens
GVQLLESGGGLVQPGGSLRLSCAASGFIFAWYDMMWARQAPGKGLEWVSSINDGGNVTYYADSVKGRFTISRDNSKNTLYLQMNSLRAEDTAVYYCATAEDEPGYDYWGQGTLVTVSS

SEQ ID NO: 2291 - protein, 118 aa, Homo sapiens
GVQLLESGGGLVQPGGSLRLSCAASGFIFAWYDMGWVRQAPGKGLEWVSSINDHGKITYYADSVKGRFTISRDNSKNTLYLQMNSLRAEDTAVYYCATAEDEPGYDYWGQGTLVTVSS

SEQ ID NO: 2292 - protein, 118 aa, Homo sapiens
GVQLLESGGGLVQPGGSLRLSCAASGFIFAWYDMGWVRQAPGKGLEWVSSINDTGNVTYYADSVKGRFTISRDNSKNTLYLQMNSLRAEDTAVYYCATAEDEPGYDYWGQGTLVTVSS

SEQ ID NO: 2293 - protein, 118 aa, Homo sapiens
GVQLLESGGGLVQPGGSLRLSCAASGFIFAWYDMGWVRQAPGKGLEWVSSINDKGGKTYYADSVKGRFTISRDNSKNTLYLQMNSLRAEDTAVYYCATAEDEPGYDYWGQGTLVTVSS

SEQ ID NO: 2294 - protein, 118 aa, Homo sapiens
GVQLLESGGGLVQPGGSLRLSCAASGFIFAWYDMGWARQAPGKGLEWVSSIDWKGGKTYYADSVKGRFTISRDNSKNTLYLQMNSLRAEDTAVYYCATAEDEPGFDYWGQGTLVTVSS

SEQ ID NO: 2295 - protein, 118 aa, Homo sapiens
GVQLLESGGGLVQPGGSLRLSCAASGFIFAVYDMGWARQAPGKGLEWVSSIDWKGMETYYADSVKGRFTISRDNSKNTLYLQMNSLRAEDTAVYYCATAEDEPGYDYWGQGTLVTVSS

SEQ ID NO: 2296 - protein, 118 aa, Homo sapiens
GVQLLESGGGLVQPGGSLRLSCAASGFIFAWYDMGWVRQAPGKGLEWVSSINDKGMETYYADSVKGRFTISRDNSKNTLYLQMNSLRAEDTAVYYCATAEDEPGYDYWGQGTLVTVSS

SEQ ID NO: 2297 - protein, 118 aa, Homo sapiens
GVQLLESGGGLVQPGGSLRLSCAASGFIFAWYDMGWVRQAPGKGLEWVSSINDRGDQTYYADSVKGRFTISRDNSKNTLYLQMNSLRAEDTAVYYCATAEDEPGYDYWGQGTLVTVSS

SEQ ID NO: 2298 - protein, 118 aa, Homo sapiens
GVQLLESGGGLVQPGGSLRLSCAASGFIFAWYDMGWVRQAPGKGLEWVSSINDQGNTTYYADSVKGRFTISRDNSKNTLYLQMNSLRAEDTAVYYCATAEDEPGYDYWGQGTLVTVSS

SEQ ID NO: 2299 - protein, 118 aa, Homo sapiens
GVQLLESGGGLVQPGGSLRLSCAASGFIFAAYAMGWVRQAPGKGLEWVSSIDWKGMETYYADSVKGRFTISRDNSKNTLYLQMNSLRAEDTAVYYCATAEDEPGYDYWGQGTLVTVSS

SEQ ID NO: 2300 - protein, 118 aa, Homo sapiens
GVQLLESGGGLVQPGGSLRLSCAASGFIFAAYAMAWVRQAPGKGLEWVSSIDWKGMETYYADSVKGRFTISRDNSKNTLYLQMNSLRAEDTAVYYCATAEDEPGYDYWGQGTLVTVSS

SEQ ID NO: 2301 - protein, 118 aa, Homo sapiens
GVQLLESGGGLVQPGGSLRLSCAASGFIFAWYDMGWVRQAPGKGLEWVSSIDAAGAETYYADSVKGRFTISRDNSKNTLYLQMNSLRAEDTAVYYCATAEDEPGYDYWGQGTLVTVSS

SEQ ID NO: 2302 - protein, 118 aa, Homo sapiens
GVQLLESGGGLVQPGGSLRLSCAASGFIFAWYDMGWVRQAPGKGLEWVSSIDWAGAATYYADSVKGRFTISRDNSKNTLYLQMNSLRAEDTAVYYCATAEDEPGYDYWGQGTLVTVSS

SEQ ID NO: 2303 - protein, 118 aa, Homo sapiens
GVQLLESGGGLVQPGGSLRLSCAASGFIFAWYDMGWVRQAPGKGLEWVSSIDWKGMETYYADSVKGRFTISRDNSKNTLYLQMNSLRAEDTAVYYCATAAAEPGYDYWGQGTLVTVSS

SEQ ID NO: 2304 - protein, 118 aa, Homo sapiens
GVQLLESGGGLVQPGGSLRLSCAASGFIFAWYDMGWVRQAPGKGLEWVSSIDWKGMETYYADSVKGRFTISRDNSKNTLYLQMNSLRAEDTAVYYCATAAAAPGYDYWGQGTLVTVSS

SEQ ID NO: 2305 - protein, 118 aa, Homo sapiens
GVQLLESGGGLVQPGGSLRLSCAASGFIFAWYDMGWVRQAPGKGLEWVSSIDWKGMETYYADSVKGRFTISRDNSKNTLYLQMNSLRAEDTAVYYCATAEAAAGYDYWGQGTLVTVSS

SEQ ID NO: 2306 - protein, 118 aa, Homo sapiens
GVQLLESGGGLVQPGGSLRLSCAASGFIFAWYDMGWVRQAPGKGLEWVSSIDWKGMETYYADSVKGRFTISRDNSKNTLYLQMNSLRAEDTAVYYCATAEDAAAYDYWGQGTLVTVSS

SEQ ID NO: 2307 - protein, 118 aa, Homo sapiens
GVQLLESGGGLVQPGGSLRLSCAASGAAAAWYDMGWVRQAPGKGLEWVSSIDWKGMETYYADSVKGRFTISRDNSKNTLYLQMNSLRAEDTAVYYCATAEDEPGYDYWGQGTLVTASS

SEQ ID NO: 2308 - protein, 118 aa, Homo sapiens
GVQLLESGGGLVQPGGSLRLSCAASGFAFAAYDMGWVRQAPGKGLEWVSSIDWKGMETYYADSVKGRFTISRDNSKNTLYLQMNSLRAEDTAVYYCATAEDEPGYDYWGQGTLVTVSS

SEQ ID NO: 2309 - protein, 118 aa, Homo sapiens
GVQLLESGGGLVQPGGSLRLSCAASGFIFAWYDMGWVRQAPGKGLEWVSAIAAKGMETYYADSVKGRFTISRDNSKNTLYLQMNSLRAEDTAVYYCATAEDEPGYDYWGQGTLVTVSS

SEQ ID NO: 2310 - protein, 118 aa, Homo sapiens
GVQLLESGGGLVQPGGSLRLSCAASGFIFAWYDMGWVRQAPGKGLEWVSSIAAAGMETYYADSVKGRFTISRDNSKNTLYLQMNSLRAEDTAVYYCATAEDEPGYDYWGQGTLVTVSS

SEQ ID NO: 2311 - protein, 118 aa, Homo sapiens
GVQLLESGGGLVQPGGSLRLSCAASGFIFAWYDMGWVRQAPGKGLEWVSSINDGGEVTYYADSVKGRFTISRDNSKNTLYLQMNSLRAEDTAVYYCATAEDEPGYDYWGQGTLVTVSS

SEQ ID NO: 2312 - protein, 118 aa, Homo sapiens
GVQLLESGGGLVQPGGSLRLSCAASGFIFAWYDMGWVRQAPGKGLEWVSSIDWRGDQTYYADSVKGRFTISRDNSKNTLYLQMNSLRAEDTAVYYCATAEDEPGYDYWGQGTLVTVSS

SEQ ID NO: 2313 - protein, 118 aa, Homo sapiens
GVQLLESGGGLVQPGGSLRLSCAASGFIFAWYDMGWVRQAPGKGLEWVSSINDRGEVTYYADSVKGRFTISRDNSKNTLYLQMNSLRAEDTAVYYCATAEDEPGYDYWGQGTLVTVSS

SEQ ID NO: 2314 - protein, 118 aa, Homo sapiens
GVQLLESGGGLVQPGGSLRLSCAASGFIFAWYDMKWARQAPGKGLEWVSSIDWHGNVTYYADSVKGRFTISRDNSKNTLYLQMNSLRAEDTAVYYCATAEDEPGYDYWGQGTLVTVSS

SEQ ID NO: 2315 - protein, 118 aa, Homo sapiens
GVQLLESGGGLVQPGGSLRLSCAASGFIFAWYDMGWVRQAPGKGLEWVSSINDGGNVKYYADSVKGRFTISRDNSKNTLYLQMNSLRAEDTAVYYCATAEDEPGYDYWGQGTLVTVSS

SEQ ID NO: 2316 - protein, 118 aa, Homo sapiens
GVQLLESGGGLVQPGGSLRLSCAASGFIFAWYDMGWVRQAPGKGLEWVSSINDGGNVIYYADSVKGRFTISRDNSKNTLYLQMNSLRAEDTAVYYCATAEDEPGYDYWGQGTLVTVSS

SEQ ID NO: 2317 - protein, 118 aa, Homo sapiens
GVQLLESGGGLVQPGGSLRLSCAASGFIFAWYDMGWVRQAPGKGLEWVSSIDWKGGKTYYADSVKGRFTISRDNSKNTLYLQMNSLRAEDTAVYYCATAEDEPGYDYWGQGTLVTVSS

SEQ ID NO: 2318 - protein, 118 aa, Homo sapiens
GVQLLESGGGLVQPGGSLRLSCAASGFIFAWYDMMWARQAPGKGLEWVSSIDWKGMETYYADSVKGRFTISRDNSKNTLYLQMNSLRAEDTAVYYCATAEDEPGYDYWGQGTLVTVSS

SEQ ID NO: 2319 - protein, 118 aa, Homo sapiens
GVQLLESGGGLVQPGGSLRLSCAASGFIFAWYDMGWARQAPGKGLEWVSSIDWKGGKTYYADSVKGRFTISRDNSKNTLYLQMNSLRDEDTAVYYCATAEDEPGYDYWGQGTLVTVSS

SEQ ID NO: 2320 - protein, 118 aa, Homo sapiens
EVQLVESGGGLVQPGGSLRLSCAASGFIFAWYDMGWARQAPGKGLEWVSSIDWKGGKTYYADSVKGRFTISRDNSKNTLYLQMTSLRAEDTAVYYCATAEDEPGYDYWGQGTLVTVSS

SEQ ID NO: 2321 - protein, 118 aa, Homo sapiens; identical to SEQ ID NO: 2294

SEQ ID NO: 2322 - protein, 118 aa, Homo sapiens
EVQLVESGGGLVKPGGSLRLSCAASGFIFAWYDMGWARQAPGKGLEWVSSIDWKGGKTYYAAPVKGRFTISRDDSKNTLYLQMNSLKTEDTAVYYCATAEDEPGYDYWGQGTLVTVSS

SEQ ID NO: 2323 - protein, 118 aa, Homo sapiens
GVQLLESGGGLVQPGGSLRLSCAASGFIFAWYDMGWVRQAPGKGLEWVSSIDWKGGKTYYADSVKGRFTISRDNSKNTLYLQMNSLRAEDTAVYYCATAEDEPGFDYWGQGTLVTVSS

SEQ ID NO: 2324 - protein, 118 aa, Homo sapiens
GVQLLESGGGLVQPGGSLRLSCAASGFIFAWYDMMWARQAPGKGLEWVSSIDWHGEVTYYADSVKGRFTISRDNSKNTLYLQMNSLRAEDTAVYYCATAEDEPGYDYWGQGTLVTVSS

SEQ ID NO: 2325 - protein, 118 aa, Homo sapiens; identical to SEQ ID NO: 2282

SEQ ID NO: 2326 - protein, 118 aa, Homo sapiens
EVQLLESGGGLVQPGGSLRLSCAASGFIFAWYDMGWVRQAPGKGLEWVSSIDWKGGKTYYADSVKGRFTISRDNSKNTLYLQMNSLRAEDTAVYYCATAEDEPGYDYWGQGTLVTVSS

SEQ ID NO: 2327 - protein, 118 aa, Homo sapiens
QVQLLESGGGLVQPGGSLRLSCAASGFIFAWYDMGWARQAPGKGLEWVSSIDWKGGKTYYADSVKGRFTISRDNSKNTLYLQMNSLRAEDTAVYYCATAEDEPGYDYWGQGTLVTVSS

SEQ ID NO: 2328 - protein, 118 aa, Homo sapiens
QVQLLESGGGLVQPGGSLRLSCAASGFIFAWYDMGWVRQAPGKGLEWVSSIDWKGGKTYYADSVKGRFTISRDNSKNTLYLQMNSLRAEDTAVYYCATAEDEPGYDYWGQGTLVTVSS

SEQ ID NO: 2329 - protein, 118 aa, Homo sapiens
GVQLLESGGGLVQPGGSLRLSCAASGFIFAWYDMMWVRQAPGKGLEWVSSIDWHGNVTYYADSVKGRFTISRDNSKNTLYLQMNSLRAEDTAVYYCATAEDEPGYDYWGQGTLVTVSS

SEQ ID NO: 2330 - protein, 118 aa, Homo sapiens
GVQLLESGGGLVQPGGSLRLSCAASGFIFAWYDMGWVRQAPGKGLEWVSSINDGGNVGYYADSVKGRFTISRDNSKNTLYLQMNSLRAEDTAVYYCATAEDEPGYDYWGQGTLVTVSS

SEQ ID NO: 2331 - protein, 118 aa, Homo sapiens
GVQLLESGGGLVQPGGSLRLSCAASGFIFAWYDMGWVRQAPGKGLEWVSSINDGGNVWYYADSVKGRFTISRDNSKNTLYLQMNSLRAEDTAVYYCATAEDEPGYDYWGQGTLVTVSS

SEQ ID NO: 2332 - protein, 118 aa, Homo sapiens
GVQLLESGGGLVQPGGSLRLSCAASGFIFAWYDMGWVRQAPGKGLEWVSSINDGGNVMYYADSVKGRFTISRDNSKNTLYLQMNSLRAEDTAVYYCATAEDEPGYDYWGQGTLVTVSS

SEQ ID NO: 2333 - protein, 118 aa, Homo sapiens
GVQLLESGGGLVQPGGSLRLSCAASGFIFAWYDMGWVRQAPGKGLEWVSSINDGGNVRYYADSVKGRFTISRDNSKNTLYLQMNSLRAEDTAVYYCATAEDEPGYDYWGQGTLVTVSS

SEQ ID NO: 2334 - protein, 118 aa, Homo sapiens
GVQLLESGGGLVQPGGSLRLSCAASGFIFAWYDMGWVRQAPGKGLEWVSSINDGGNVQYYADSVKGRFTISRDNSKNTLYLQMNSLRAEDTAVYYCATAEDEPGYDYWGQGTLVTVSS

SEQ ID NO: 2335 - protein, 118 aa, Homo sapiens
GVQLLESGGGLVQPGGSLRLSCAASGFIFAWYDMGWVRQAPGKGLEWVSSINDGGNVSYYADSVKGRFTISRDNSKNTLYLQMNSLRAEDTAVYYCATAEDEPGYDYWGQGTLVTVSS

SEQ ID NO: 2336 - protein, 118 aa, Homo sapiens
GVQLLESGGGLVQPGGSLRLSCAASGFIFAWYDMGWVRQAPGKGLEWVSSINDGGNVEYYADSVKGRFTISRDNSKNTLYLQMNSLRAEDTAVYYCATAEDEPGYDYWGQGTLVTVSS

SEQ ID NO: 2337 - protein, 118 aa, Homo sapiens
GVQLLESGGGLVQPGGSLRLSCAASGFIFAWYDMGWVRQAPGKGLEWVSSINDGGNVFYYADSVKGRFTISRDNSKNTLYLQMNSLRAEDTAVYYCATAEDEPGYDYWGQGTLVTVSS

SEQ ID NO: 2338 - protein, 118 aa, Homo sapiens
GVQLLESGGGLVQPGGSLRLSCAASGFIFAWYDMGWVRQAPGKGLEWVSSINDGGNVLYYADSVKGRFTISRDNSKNTLYLQMNSLRAEDTAVYYCATAEDEPGYDYWGQGTLVTVSS

SEQ ID NO: 2339 - protein, 118 aa, Homo sapiens
GVQLLESGGGLVQPGGSLRLSCAASGFIFAWYDMGWVRQAPGKGLEWVSSINDGGNVPYYADSVKGRFTISRDNSKNTLYLQMNSLRAEDTAVYYCATAEDEPGYDYWGQGTLVTVSS

SEQ ID NO: 2340 - protein, 118 aa, Homo sapiens
GVQLLESGGGLVQPGGSLRLSCAASGFIFAWYDMGWARQAPGKGLEWVSSIDWKGGKTYYADSVKGRFTISADNSKNTLYLQMNSLRAEDTAVYYCATAEDEPGYDYWGQGTLVTVSS

SEQ ID NO: 2341 - protein, 118 aa, Homo sapiens
GVQLLESGGGLVQPGGSLRLSCAASGFIFAWYDMGWARQAPGKGLEWVSSIDWKGGKTYYADSVKGRFTISKDNSKNTLYLQMNSLRAEDTAVYYCATAEDEPGYDYWGQGTLVTVSS

SEQ ID NO: 2342 - protein, 120 aa, Homo sapiens
GVQLLESGGGLVQPGGSLRLSCAASGFIFAWYDMGWARQAPGKGLEWVSSIDWKTKGGKTYYADSVKGRFTISRDNSKNTLYLQMNSLRAEDTAVYYCATAEDEPGYDYWGQGTLVTVSS

SEQ ID NO: 2343 - protein, 120 aa, Homo sapiens
GVQLLESGGGLVQPGGSLRLSCAASGFIFAWYDMGWARQAPGKGLEWVSSIDWKAKGGKTYYADSVKGRFTISRDNSKNTLYLQMNSLRAEDTAVYYCATAEDEPGYDYWGQGTLVTVSS

SEQ ID NO: 2344 - protein, 118 aa, Homo sapiens
EVQLLESGGGLVQPGGSLRLSCAASGFIFAWYDMGWARQAPGKGLEWVSSIDWKGGKTYYADSVKGRFTISRDNSKNTLYLQMNSLRDEDTAVYYCATAEDEPGYDYWGQGTLVTVSS

SEQ ID NO: 2345 - protein, 118 aa, Homo sapiens
GVQLLESGGGLVQPGGSLRLSCAASGFIFAWYDMKWARQAPGKGLEWVSSIDWHGEVTYYADSVKGRFTISRDNSKNTLYLQMNSLRAEDTAVYYCATAEDEPGYDYWGQGTLVTVSS

SEQ ID NO: 2346 - protein, 118 aa, Homo sapiens
GVQLLESGGGLVQPGGSLRLSCAASGFIFAWYDMMWVRQAPGKGLEWVSSIDWHGEVTYYADSVKGRFTISRDNSKNTLYLQMNSLRAEDTAVYYCATAEDEPGYDYWGQGTLVTVSS

SEQ ID NO: 2347 - protein, 118 aa, Homo sapiens
GVQLLESGGGLVQPGGSLRLSCAASGFIFAWYDMGWVRQAPGKGLEWVSSINDGGNVAYYADSVKGRFTISRDNSKNTLYLQMNSLRAEDTAVYYCATAEDEPGYDYWGQGTLVTVSS

SEQ ID NO: 2348 - protein, 119 aa, Homo sapiens
GVQLLESGGGLVQPGGSLRLSCAASGFIFAWAYDMGWARQAPGKGLEWVSSIDWKGGKTYYADSVKGRFTISRDNSKNTLYLQMNSLRAEDTAVYYCATAEDEPGYDYWGQGTLVTVSS

SEQ ID NO: 2349 - protein, 119 aa, Homo sapiens
GVQLLESGGGLVQPGGSLRLSCAASGFIFAWSYDMGWARQAPGKGLEWVSSIDWKGGKTYYADSVKGRFTISRDNSKNTLYLQMNSLRAEDTAVYYCATAEDEPGYDYWGQGTLVTVSS

SEQ ID NO: 2350 - protein, 118 aa, Homo sapiens
GVQLLESGGGLVQPGGSLRLSCAVSGFIFAWYDMGWARQAPGKGLEWVSSIDWKGGKTYYADSVKGRFTISRDNSKNTLYLQMNSLRAEDTAVYYCATAEDEPGYDYWGQGTLVTVSS

SEQ ID NO: 2351 - protein, 118 aa, Homo sapiens
GVQLLESGGGLVQPGGSLRLSCAASGFIFAWYDMKWARQAPGKGLEWVSSIDWHGEVTYYADSVKGRFTISRDNSKNTLYLQMNSLRDEDTAVYYCATAEDEPGYDYWGQGTLVTVSS

SEQ ID NO: 2352 - protein, 118 aa, Homo sapiens
EVQLLESGGGLVQPGGSLRLSCAASGFTFDREEMDWVRQAPGKGLEWVSSIDWKGGKTYYADSVKGRFTISRDNSKNTLYLQMNSLRAEDTAVYYCATAEDEPGYDYWGQGTLVTVSS

SEQ ID NO: 2353 - protein, 118 aa, Homo sapiens
GVQLLESGGGLVQPGGSLRLSCAASGFIFAWYDMKWVRQAPGKGLEWVSSIDWHGEVTYYADSVKGRFTISRDNSKNTLYLQMNSLRDEDTAVYYCATAEDEPGYDYWGQGTLVTVSS

SEQ ID NO: 2354 - protein, 118 aa, Homo sapiens
GVQLLESGGGLVQPGGSLRLSCAASGYSFAWYDMGWVRQAPGKGLEWVSSIDWKGGKTYYADSVKGRFTISRDNSKNTLYLQMNSLRAEDTAVYYCATAEDEPGYDYWGQGTLVTVSS

SEQ ID NO: 2355 - protein, 118 aa, Homo sapiens
GVQLLESGGGLVQPGGSLRLSCAASGFTFGAYDMGWVRQAPGKGLEWVSSIDWKGGKTYYADSVKGRFTISRDNSKNTLYLQMNSLRAEDTAVYYCATAEDEPGYDYWGQGTLVTVSS

SEQ ID NO: 2356 - protein, 118 aa, Homo sapiens
GVQLLESGGGLVQPGGSLRLSCAASGFTFPFYDMGWVRQAPGKGLEWVSSIDWKGGKTYYADSVKGRFTISRDNSKNTLYLQMNSLRAEDTAVYYCATAEDEPGYDYWGQGTLVTVSS

SEQ ID NO: 2357 - protein, 118 aa, Homo sapiens
GVQLLESGGGLVQPGGSLRLSCAASGFVFATYDMGWVRQAPGKGLEWVSSIDWKGGKTYYADSVKGRFTISRDNSKNTLYLQMNSLRAEDTAVYYCATAEDEPGYDYWGQGTLVTVSS

SEQ ID NO: 2358 - protein, 118 aa, Homo sapiens
GVQLLESGGGLVQPGGSLRLSCAASGFSFSVYDMGWVRQAPGKGLEWVSSIDWKGGKTYYADSVKGRFTISRDNSKNTLYLQMNSLRAEDTAVYYCATAEDEPGYDYWGQGTLVTVSS

SEQ ID NO: 2359 - protein, 118 aa, Homo sapiens
GVQLLESGGGLVQPGGSLRLSCAASGLMLSAYDMGWVRQAPGKGLEWVSSIDWKGGKTYYADSVKGRFTISRDNSKNTLYLQMNSLRAEDTAVYYCATAEDEPGYDYWGQGTLVTVSS

SEQ ID NO: 2360 - protein, 118 aa, Homo sapiens
GVQLLESGGGLVQPGGSLRLSCAASGFLFTTYDMGWVRQAPGKGLEWVSSIDWKGGKTYYADSVKGRFTISRDNSKNTLYLQMNSLRAEDTAVYYCATAEDEPGYDYWGQGTLVTVSS

SEQ ID NO: 2361 - protein, 118 aa, Homo sapiens
GVQLLESGGGLVQPGGSLRLSCAASGFTFAWYDMGWVRQAPGKGLEWVSSIDWKGGKTYYADSVKGRFTISRDNSKNTLYLQMNSLRAEDTAVYYCATAEDEPGYDYWGQGTLVTVSS

SEQ ID NO: 2362 - protein, 118 aa, Homo sapiens
GVQLLESGGGLVQPGGSLRLSCAASGFSFAWYDMGWVRQAPGKGLEWVSSIDWKGGKTYYADSVKGRFTISRDNSKNTLYLQMNSLRAEDTAVYYCATAEDEPGYDYWGQGTLVTVSS

SEQ ID NO: 2363 - protein, 118 aa, Homo sapiens
GVQLLESGGGLVQPGGSLRLSCAASGFMFSGYDMGWVRQAPGKGLEWVSSIDWKGGKTYYADSVKGRFTISRDNSKNTLYLQMNSLRAEDTAVYYCATAEDEPGYDYWGQGTLVTVSS

SEQ ID NO: 2364 - protein, 118 aa, Homo sapiens
GVQLLESGGGLVQPGGSLRLSCAASGFFFPWYDMGWVRQAPGKGLEWVSSIDWKGGKTYYADSVKGRFTISRDNSKNTLYLQMNSLRAEDTAVYYCATAEDEPGYDYWGQGTLVTVSS

SEQ ID NO: 2365 - protein, 118 aa, Homo sapiens
GVQLLESGGGLVQPGGSLRLSCAASGFSFLWYDMGWVRQAPGKGLEWVSSIDWKGGKTYYADSVKGRFTISRDNSKNTLYLQMNSLRAEDTAVYYCATAEDEPGYDYWGQGTLVTVSS

SEQ ID NO: 2366 - protein, 118 aa, Homo sapiens
GVQLLESGGGLVQPGGSLRLSCAASGFIFAVYDMGWVRQAPGKGLEWVSSIDWHGKITYYADSVKGRFTISRDNSKNTLYLQMNSLRAEDTAVYYCATAEDEPGYDYWGQGTLVTVSS

SEQ ID NO: 2367 - protein, 118 aa, Homo sapiens
GVQLLESGGGLVQPGGSLRLSCAASGFIFAWYDMKWVRQAPGKGLEWVSSIDWHGKITYYADSVKGRFTISRDNSKNTLYLQMNSLRAEDTAVYYCATAEDEPGYDYWGQGTLVTVSS

SEQ ID NO: 2368 - protein, 118 aa, Homo sapiens
GVQLLESGGGLVQPGGSLRLSCAASGFTFAWYDMGWVRQAPGKGLEWVSSIDWHGKITYYADSVKGRFTISRDNSKNTLYLQMNSLRAEDTAVYYCATAEDEPGYDYWGQGTLVTVSS

SEQ ID NO: 2369 - protein, 118 aa, Homo sapiens
GVQLLESGGGLVQPGGSLRLSCAASGFTFAWYDMGWVRQAPGKGLEWVSSIDWHGEVTYYADSVKGRFTISRDNSKNTLYLQMNSLRAEDTAVYYCATAEDEPGYDYWGQGTLVTVSS

SEQ ID NO: 2370 - protein, 118 aa, Homo sapiens
GVQLLESGGGLVQPGGSLRLSCAASGFIFGWYDMGWVRQAPGKGLEWVSSIDWKGGKTYYADSVKGRFTISRDNSKNTLYLQMNSLRAEDTAVYYCATAEDEPGYDYWGQGTLVTVSS

SEQ ID NO: 2371 - protein, 118 aa, Homo sapiens; identical to SEQ ID NO: 2370

SEQ ID NO: 2372 - protein, 118 aa, Homo sapiens
GVQLLESGGGLVQPGGSLRLSCAASGFNFAWYDMGWVRQAPGKGLEWVSSIDWKGGKTYYADSVKGRFTISRDNSKNTLYLQMNSLRAEDTAVYYCATAEDEPGYDYWGQGTLVTVSS

SEQ ID NO: 2373 - protein, 118 aa, Homo sapiens
GVQLLESGGGLVQPGGSLRLSCAASGFMFSWYDMGWVRQAPGKGLEWVSSIDWKGGKTYYADSVKGRFTISRDNSKNTLYLQMNSLRAEDTAVYYCATAEDEPGYDYWGQGTLVTVSS

SEQ ID NO: 2374 - protein, 118 aa, Homo sapiens
GVQLLESGGGLVQPGGSLRLSCAASGFVFPWYDMGWVRQAPGKGLEWVSSIDWKGGKTYYADSVKGRFTISRDNSKNTLYLQMNSLRAEDTAVYYCATAEDEPGYDYWGQGTLVTVSS

SEQ ID NO: 2375 - protein, 118 aa, Homo sapiens
GVQLLESGGGLVQPGGSLRLSCAASGFIFRWYDMGWVRQAPGKGLEWVSSIDWKGGKTYYADSVKGRFTISRDNSKNTLYLQMNSLRAEDTAVYYCATAEDEPGYDYWGQGTLVTVSS

SEQ ID NO: 2376 - protein, 118 aa, Homo sapiens
GVQLLESGGGLVQPGGSLRLSCAASGFLFFWYDMGWVRQAPGKGLEWVSSIDWKGGKTYYADSVKGRFTISRDNSKNTLYLQMNSLRAEDTAVYYCATAEDEPGYDYWGQGTLVTVSS

SEQ ID NO: 2377 - protein, 118 aa, Homo sapiens
GVQLLESGGGLVQPGGSLRLSCAASGFIFAWYDMGWARQAPGKGLEWVSIIACKGGKTYYADSVKGRFTISRDNSKNTLYLQMNSLRAEDTAVYYCATAEDEPGYDYWGQGTLVTVSS

SEQ ID NO: 2378 - protein, 118 aa, Homo sapiens
GVQLLESGGGLVQPGGSLRLSCAASGFIFAWYDMGWARQAPGKGLEWVSKIGDKGGKTYYADSVKGRFTISRDNSKNTLYLQMNSLRAEDTAVYYCATAEDEPGYDYWGQGTLVTVSS

SEQ ID NO: 2379 - protein, 118 aa, Homo sapiens
GVQLLESGGGLVQPGGSLRLSCAASGFVFSWYDMGWVRQAPGKGLEWVSSIDLAGRKTYYADSVKGRFTISRDNSKNTLYLQMNSLRAEDTAVYYCATAEDEPGYDYWGQGTLVTVSS

SEQ ID NO: 2380 - protein, 118 aa, Homo sapiens
GVQLLESGGGLVQPGGSLRLSCAASGFWYDVYDMGWVRQAPGKGLEWVSSIDWKGGKTYYADSVKGRFTISRDNSKNTLYLQMNSLRAEDTAVYYCATAEDEPGYDYWGQGTLVTVSS

SEQ ID NO: 2381 - protein, 118 aa, Homo sapiens
GVQLLESGGGLVQPGGSLRLSCAASGFVFAWYDMGWVRQAPGKGLEWVSSIDWKGGKTYYADSVKGRFTISRDNSKNTLYLQMNSLRAEDTAVYYCATAEDEPGYDYWGQGTLVTVSS

SEQ ID NO: 2382 - protein, 118 aa, Homo sapiens
GVQLLESGGGLVQPGGSLRLSCAASGFLFSTYDMGWVRQAPGKGLEWVSSIDWKGGKTYYADSVKGRFTISRDNSKNTLYLQMNSLRAEDTAVYYCATAEDEPGYDYWGQGTLVTVSS

SEQ ID NO: 2383 - protein, 118 aa, Homo sapiens
GVQLLESGGGLVQPGGSLRLSCAASGLLFAAYDMGWVRQAPGKGLEWVSSIDWKGGKTYYADSVKGRFTISRDNSKNTLYLQMNSLRAEDTAVYYCATAEDEPGYDYWGQGTLVTVSS

SEQ ID NO: 2384 - protein, 118 aa, Homo sapiens
GVQLLESGGGLVQPGGSLRLSCAASGFVFDVYDMGWARQAPGKGLEWVSSIDWKGGKTYYADSVKGRFTISRDNSKNTLYLQMNSLRAEDTAVYYCATAEDEPGYDYWGQGTLVTVSS

SEQ ID NO: 2385 - protein, 118 aa, Homo sapiens
GVQLLESGGGLVQPGGSLRLSCAASGFIFAWYDMGWVRQAPGKGLEWVSSIDWKGGKTYYADSVKGRFTISRDNSKNTLYLQMNSLRAEDTAVYYCATADDEPGYDYWGQGTLVTVSS

SEQ ID NO: 2386 - protein, 118 aa, Homo sapiens
GVQLLESGGGLVQPGGSLRLSCAASGFIFAWYDMGWARQAPGKGLEWVSSIDWKGNKTYYADSVKGRFTISRDNSKNTLYLQMNSLRAEDTAVYYCATAEDEPGYDYWGQGTLVTVSS

SEQ ID NO: 2387 - protein, 118 aa, Homo sapiens
GVQLLESGGGLVQPGGSLRLSCAASGFIFATYDMRWVRQAPGKGLEWVSSIDWKGGKTYYADSVKGRFTISRDNSKNTLYLQMNSLRAEDTAVYYCATAEDEPGYDYWGQGTLVTVSS

SEQ ID NO: 2388 - protein, 118 aa, Homo sapiens
GVQLLESGGGLVQPGGSLRLSCAASGFTMNWYDMGWVRQAPGKGLEWVSSIDWKGGKTYYADSVKGRFTISRDNSKNTLYLQMNSLRAEDTAVYYCATAEDEPGYDYWGQGTLVTVSS

SEQ ID NO: 2389 - protein, 118 aa, Homo sapiens
GVQLLESGGGLVQPGGSLRLSCAASGFIFHTYDMGWVRQAPGKGLEWVSSIDWKGGKTYYADSVKGRFTISRDNSKNTLYLQMNSLRAEDTAVYYCATAEDEPGYDYWGQGTLVTVSS

SEQ ID NO: 2390 - protein, 118 aa, Homo sapiens
GVQLLESGGGLVQPGGSLRLSCAASGFLFWVYDMGWVRQAPGKGLEWVSSIDSIGAKTYYADSVKGRFTISRDNSKNTLYLQMNSLRAEDTAVYYCATAEDEPGYDYWGQGTLVTVSS

SEQ ID NO: 2391 - protein, 118 aa, Homo sapiens
GVQLLESGGGLVQPGGSLRLSCAASGFIFAWYDMGWARQAPGKGLEWVSTIDNKGGKTYYADSVKGRFTISRDNSKNTLYLQMNSLRAEDTAVYYCATAEDEPGYDYWGQGTLVTVSS

SEQ ID NO: 2392 - protein, 118 aa, Homo sapiens; identical to SEQ ID NO: 2362

SEQ ID NO: 2393 - DNA, 324 bp, Homo sapiens
gacatccagatgacccagtcaccatcctccctatctgcatctgtaggagaccgtgtcaccatcacttgccgggcaagtcgccacattagcgactggttacattggtatcagcagaaaccagggaaagcccccaagctcctgatcccgtgggcctccgggttgtggagtggggtcccatcacgtttcagtggcagtgggtctgggacagatttcactctcaccatcagcagtctgcaacccgaagattttgctacgtactactgtttgcaggaggggtggggtcctccgacgttcggccaagggaccaaggtggaaatcaaacgg

SEQ ID NO: 2394 - DNA, 324 bp, Homo sapiens
gacatccagatgacccagtcaccatcctccctgtctgcatctgtaggagaccgtgtcaccatcacttgccgggcaagtcgccacattggcgactggttacattggtatcagcagaaaccagggaaagcccccaagctcctgatcgcctgggcgtccacgttggacagtggggtcccatcacgtttcagtggcagtgggtctgggacagatttcactctcaccatcagcagtctgcaacccgaagattttgctacgtactactgtttgcaggaggggtggggtcctccgacgttcggccaagggaccaaggtggaaatcaaacgg

SEQ ID NO: 2395 - DNA, 348 bp, Homo sapiens
gaggtgcagctgttggactctgggggaggcttggtacagcctggggggtccctgcgtctctcctgtgcagcctccggattcacctttcgtaatttcgggatggggtgggtccgccaggctccagggaagggtctagagtgggtctcatggattgatgcgtctggtactgagacatactacgcagaccctgtgaagggccggttcaccatctcccgcgacaattccaagaacacgctgtatctgcaaatgaacagcctgcgtgccgaggacaccgcggtatattactgtgcgaaaagtctggggcgttttgactactggggtcagggaaccctggtcaccgtcccgagt

SEQ ID NO: 2396 - DNA, 348 bp, Homo sapiens
gaggtgcagctgttggactctgggggaggcttggtacagcctggggggtccctgcgtctctcctgtgcagcctccggattcacctttcgtaatttcgggatggggtgggtccgccaggctccagggaagggtctagagtgggtctcatggattctggggtctggtactgagacatactacgcagaccctgtgaagggccggttcaccatctcccgcgacaattccaggaacacgctgtatctgcaaatgaacagcctgcgtgccgaggacaccgcggtatattactgtgcgaaaagtctggggcgttttgactactggggtcagggaaccctggtcaccgtctcgagc

SEQ ID NO: 2397 - DNA, 348 bp, Homo sapiens
gaggtgcagctgttggactctgggggaggcttggtacagcctggggggtccctgcgtctctcctgtgcagcctccggattcacctttcgtaatttcgggatggggtgggtccgccaggctccagggaagggtctagagtgggtctcatggattgtggggtcgggtactgagacatactacgcagaccctgtgaagggccggttcaccatctcccgcgacaattccaagaacacgctgtatctgcaaatgaacagcctgcgtgccgaggacaccgcggtatattactgtgcgaaaagtctggggcgttttgactactggggtcagggaaccctggtcaccgtctcgagc

SEQ ID NO: 2398 - DNA, 348 bp, Homo sapiens
gaggtgcagctgttggactctgggggaggcttggtacagcctggggggtccctgcgtctctcctgtgcagcctccggattcacctttcgtaatttcgggatggggtgggtccgccaggctccagggaagggtctagagtgggtctcatggattgagggggggggtactgagacatactacgcagaccctgtgaagggccggttcaccatctcccgcgacaattccaagaacacgctgtatctgcaaatgaacagcctgcgtgccgaggacaccgcggtatattactgtgcgaaaagtctggggcgttttgactactggggtcagggaaccctggtcaccgtctcgagc

SEQ ID NO: 2399 - DNA, 348 bp, Homo sapiens
gaggtgcagctgttggactctgggggaggcttggtacagcctggggggtccctgcgtctctcctgtgcagcctccggattcacctttcgtaatttcgggatggggtgggtccgccaggctccagggaagggtctagagtgggtctcatggattatctcctctggtactgagacatactacgcagaccctgtgaagggccggttcaccatctcccgcgacaattccaagaacacgctgtatctgcaaatgaacagcctgcgtgccgaggacaccgcggtatattactgtgcgaaaagtctggggcgttttgactactggggtcagggaaccctggtcaccgtctcgggc

SEQ ID NO: 2400 - DNA, 348 bp, Homo sapiens
gaggtgcagctgttggagtctgggggaggcttggtacagcctggggggtccctgcgtctctcctgtgcagcctccggattcacctttcgtaatttcgggatggggtgggtccgccaggctccagggaagggtctagagtgggtctcatggattctggggtctggtactgagacatactacgcagactccgtgaagggccggttcaccatctcccgcgacaattccaagaacacgctgtatctgcaaatgaacagcctgcgtgccgaggacaccgcggtatattactgtgcgaaaagtctggggcgttttgactactggggtcagggaaccctggtcaccgtctcgagc

SEQ ID NO: 2401 - DNA, 348 bp, Homo sapiens
gaggtgcagctgttggagtctgggggaggcttggtacagcctggggggtccctgcgtctctcctgtgcagcctccggattcacctttcgtaatttcgggatggggtgggtccgccaggctccagggaagggtctagagtgggtctcatggattatctcctctggtactgagacatactacgcagactccgtgaagggccggttcaccatctcccgcgacaattccaagaacacgctgtatctgcaaatgaacagcctgcgtgccgaggacaccgcggtatattactgtgcgaaaagtctggggcgttttgactactggggtcagggaaccctggtcaccgtctcgagc

SEQ ID NO: 2402 - DNA, 348 bp, Homo sapiens
gaggtgcagctgttggagtctgggggaggcttggtacagcctggagggtccctgcgtctctcctgtgcagcctccggattcacctttcgtaattatgggatggcgtgggtccgccaggctccagggaagggtctagagtgggtctcatggattgagggggggggtactgagacatactacgcagaccctgtgaagggccggttcaccatctcccgcgacaattccaagaacacgctgtatctgcaaatgaacagcctgcgtgccgaggacaccgcggtatattactgtgcgaaaagtctggggcgttttgactactggggtcagggaaccctggtcaccgtctcgagc

SEQ ID NO: 2403 - DNA, 348 bp, Homo sapiens
gaggtgcagctgttggagtctgggggaggcttggtacagcctggggggtccctgcgtctctcctgtgcagcctccggattcacctttcgtaatttcgggatggggtgggtccgccaggctccagggaagggtctagagtgggtctcatggattgatgcgtctggtactgagacatactacgcagaccctgtgaagggccggttcaccatctcccgcgacaattccaagaacacgctgtatctgcaaatgaacagcctgcgtgccgaggacaccgcggtatattactgtgcgaaaagtctggggcgttttgactactggggtcagggaaccctggtcaccgtctcgagc

SEQ ID NO: 2404 - DNA, 348 bp, Homo sapiens
gaggtgcagctgttggagtctgggggaggcttggtacagcctggggggtccctgcgtctctcctgtgcagcctccggattcacctttcgtaatttcgggatggggtgggtccgccaggctccagggaagggtctagagtgggtctcatggattctggggtctggtactgaggaatactacgcagactccgtgaagggccggttcaccatctcccgcgacaattccaagaacacgctgtatctgcaaatgaacagcctgcgtgccgaggacaccgcggtatattactgtgcgaaaagtctggggcgttttgactactggggtcagggaaccctggtcaccgtctcgagc

SEQ ID NO: 2405 - DNA, 348 bp, Homo sapiens
gaggtgcagctgttggagtctgggggaggcttggtacagcctggggggtccctgcgtctctcctgtgcagcctccggattcacctttcgtaatttcgggatggggtgggtccgccaggctccagggaagggtctagagtgggtctcatggattctggggtctggtactgaggaatactacgcagactccgtgaagggccggttcaccatctcccgcgacaattccaggaacacgctgtatctgcaaatgaacagcctgcgtgccgaggacaccgcggtatattactgtgcgaaaagtctggggcgttttgactactggggtcagggaaccctggtcaccgtctcgagc

SEQ ID NO: 2406 - DNA, 348 bp, Homo sapiens
gaggtgcagctgttggagtctgggggaggcttggtacagcctggggggtccctgcgtctctcctgtgcagcctccggattcacctttcgtaatttcgggatggggtgggtccgccaggctccagggaagggtctagagtgggtctcatggattgtggggtcgggtactgaggaatactacgcagactccgtgaagggccggttcaccatctcccgcgacaattccaagaacacgctgtatctgcaaatgaacagcctgcgtgccgaggacaccgcggtatattactgtgcgaaaagtctggggcgttttgactactggggtcagggaaccctggtcaccgtctcgagc

SEQ ID NO: 2407 - DNA, 348 bp, Homo sapiens
gaggtgcagctgttggagtctgggggaggcttggtacagcctggggggtccctgcgtctctcctgtgcagcctccggattcacctttcgtaatttcgggatggggtgggtccgccaggctccagggaagggtctagagtgggtctcatggattgagggggggggtactgaggaatactacgcagactccgtgaagggccggttcaccatctcccgcgacaattccaagaacacgctgtatctgcaaatgaacagcctgcgtgccgaggacaccgcggtatattactgtgcgaaaagtctggggcgttttgactactggggtcagggaaccctggtcaccgtctcgagc

SEQ ID NO: 2408 - DNA, 348 bp, Homo sapiens
gaggtgcagctgttggagtctgggggaggcttggtacagcctggggggtccctgcgtctctcctgtgcagcctccggattcacctttcgtaatttcgggatggggtgggtccgccaggctccagggaagggtctagagtgggtctcatggattatctcctctggtactgaggaatactacgcagactccgtgaagggccggttcaccatctcccgcgacaattccaagaacacgctgtatctgcaaatgaacagcctgcgtgccgaggacaccgcggtatattactgtgcgaaaagtctggggcgttttgactactggggtcagggaaccctggtcaccgtctcgagc

SEQ ID NO: 2409 - DNA, 348 bp, Homo sapiens
gaggtgcagctgttggagtctgggggaggcttggtacagcctggggggtccctgcgtctctcctgtgcagcctccggattcacctttcgtaatttcgggatggggtgggtccgccaggctccagggaagggtctagagtgggtctcatggattgagggggggggtactgagacatactacgcagactccgtgaagggccggttcaccatctcccgcgacaattccaagaacacgctgtatctgcaaatggcgagcctgcgtgccgaggacaccgcggtatattactgtgcgaaaagtctggggcgttttgactactggggtcagggaaccctggtcaccgtctcgagc

SEQ ID NO: 2410 - DNA, 348 bp, Homo sapiens
gaggtgcagctgttggagtctgggggaggcttggtacagcctggggggtccctgcgtctctcctgtgcagcctccggattcacctttcgtaatttcgggatggggtgggtccgccaggctccagggaagggtctagagtgggtctcatggattctggggtctggtactgagacatactacgcagactccgtgaagggccggttcaccatctcccgcgacaattccaagaacacgctgtatctgcaaatggcgagcctgcgtgccgaggacaccgcggtatattactgtgcgaaaagtctggggcgttttgactactggggtcagggaaccctggtcaccgtctcgagc

SEQ ID NO: 2411 - DNA, 348 bp, Homo sapiens
gaggtgcagctgttggagtctgggggaggcttggtacagcctggggggtccctgcgtctctcctgtgcagcctccggattcacctttcgtaatttcgggatggggtgggtccgccaggctccagggaagggtctagagtgggtctcatggattatctcctctggtactgagacatactacgcagactccgtgaagggccggttcaccatctcccgcgacaattccaagaacacgctgtatctgcaaatggcgagcctgcgtgccgaggacaccgcggtatattactgtgcgaaaagtctggggcgttttgactactggggtcagggaaccctggtcaccgtctcgagc

SEQ ID NO: 2412 - DNA, 348 bp, Homo sapiens
gaggtgcagctgttggagtctgggggaggcttggtacagcctggggggtccctgcgtctctcctgtgcagcctccggattcacctttcgtaatttcgggatggggtgggtccgccaggctccagggaagggtctagagtgggtctcatggattatctcctctggtactgagacatactacgcagactccgtgaagggccggttcaccatctcccgcgacaattccaagaacacgctgtatctgcaaatgaacagcctgcgtgccgaggacaccgcggtatattactgtgcgaaaagttatggtgcttttgactactggggtcagggaaccctggtcaccgtctcgagc

SEQ ID NO: 2413 - DNA, 348 bp, Homo sapiens
gaggtgcagctgttggagtctgggggaggcttggtacagcctggggggtccctgcgtctctcctgtgcagcctccggattcacctttcgtaatttcgggatggggtgggtccgccaggctccagggaagggtctagagtgggtctcatggattatctcctctggtactgagacatactacgcagactccgtgaagggccggttcaccatctcccgcgacaattccaagaacacgctgtatctgcaaatgaacagcctgcgtgatgaggacaccgcggtatattactgtgcgaaaagtctggggcgttttgactactggggtcagggaaccctggtcaccgtctctagc

SEQ ID NO: 2414 - DNA, 348 bp, Homo sapiens
gaggtgcagctggtggagtctgggggaggcttggtacagcctggggggtccctgcgtctctcctgtgcagcctccggattcacctttcgtaatttcgggatggggtgggtccgccaggctccagggaagggtctagagtgggtctcatggattatctcctctggtactgagacatactacgcagactccgtgaagggccggttcaccatctcccgcgacaattccaagaacacgctgtatctgcaaatgacgagcctgcgtgccgaggacaccgcggtatattactgtgcgaaaagtctggggcgttttgactactggggtcagggaaccctggtcaccgtctctagc

SEQ ID NO: 2415 - DNA, 347 bp, Homo sapiens
gaagttcaattattagaaagcggtggtggtctggttcaaccgggtggtagcctgcgcctgagctgcgcggcgagcggttttactttccgcaacttcggcatgggtgggctcgtcaagcgccgggtaaaggcctggaatgggttagctggatcatctcttccggcaccgaaacatattatgcggatagcgttaaaggtcgttttactattagccgtgataacagcaaaaataccctgtacctgcaaatgaatagcctgcgcgcggaagatactgctgtttactattgcgctaagagcctgggtcgtttcgattattggggtcaaggtactctggttactgttagctct

SEQ ID NO: 2416 - DNA, 348 bp, Homo sapiens
gaagttcaattattagaaagcggtggtggtctggttcaaccgggtggtagcctgcgcctgagctgcgcggcgagcggttttactttccgcaacttcggcatgggttgggctcgtcaagcgccgggtaaaccgctggaatgggttagctggatcatctcttccggcaccgaaacatattatgcggatagcgttaaaggtcgttttactattagccgtgataacagcaaaaataccctgtacctgcaaatgaatagcctgcgcgcggaagatactgctgtttactattgcgctaagagcctgggtcgtttcgattattggggtcaaggtactctggttactgttagctct

SEQ ID NO: 2417 - DNA, 348 bp, Homo sapiens
gaagttcaattattagaaagcggtggtggtctggttcaaccgggtggtagcctgcgcctgagctgcgcggcgagcggttttactttccgcaacttcggcatgggttgggttcgtcaagcgccgggtaaagagctggaatgggttagctggatcatctcttccggcaccgaaacatattatgcggatagcgttaaaggtcgttttactattagccgtgataacagcaaaaataccctgtacctgcaaatgaatagcctgcgcgcggaagatactgctgtttactattgcgctaagagcctgggtcgtttcgattattggggtcaaggtactctggttactgttagctct

SEQ ID NO: 2418 - DNA, 348 bp, Homo sapiens
gaagttcaattattagaaagcggtggtggtctggttcaaccgggtggtagcctgcgcctgagctgcgcggcgagcggttttactttccgcaacttcggcatgggttgggttcgtcaagcgccgggtaaaggcctggaactcgttagctggatcatctcttccggcaccgaaacatattatgcggatagcgttaaaggtcgttttactattagccgtgataacagcaaaaataccctgtacctgcaaatgaatagcctgcgcgcggaagatactgctgtttactattgcgctaagagcctgggtcgtttcgattattggggtcaaggtactctggttactgttagctct

SEQ ID NO: 2419 - DNA, 348 bp, Homo sapiens
gaagttcaattattagaaagcggtggtggtctggttcaaccgggtggtagcctgcgcctgagctgcgcggcgagcggttttactttccgcaacttcggcatgggttgggctcgtcaagcgccgggtaaaggcctggaatgggttagctggatcatctcttccggcaccgaaacatattatgcggatagcgttaaaggtcgttttactattagccgtgataacagcaaaaataccctgtacctgcaaatgaatagcctgcgcgcggaagatactgctgtttactattgcgctaagagcctgggtcgtttcgattatttcggtcaaggtactctggttactgttagctct

SEQ ID NO: 2420 - DNA, 348 bp, Homo sapiens
gaagttcaattattagaaagcggtggtggtctggttcaaccgggtggtagcctgcgcctgagctgcgcggcgagcggttttactttccgcaacttcggcatgggttgggttcgtcaagcgccgggtaaaggcctggaatgggttagctggatcatctcttccggcaccgaaacatattatgcggatagcgttaaaggtcgttttactattagccgtgataacagcaaaaataccctgtacctgcaaatgaatagcctgcgcgcggaagatactgctgtttactattgcgctaagagcctgggtcgtttcgattattacggtcaaggtactctggttactgttagctct

SEQ ID NO: 2421 - DNA, 348 bp, Homo sapiens
gaagttcaattattagaaagcggtggtggtctggttcaaccgggtggtagcctgcgcctgagctgcgcggcgagcggttttactttccgcaacttcggcatgggttgggttcgtcaagcgccgggtaaaggcctggaatgggttagctggatcatctcttccggcaccgaaacatattatgcggatagcgttaaaggtcgttttactattagccgtgataacagcaaaaataccctgtacctgcaaatgaatagcctgcgcgcggaagatactgctgtttactattgcgctaagagcctgggtcgtttcgattatggtggtcaaggtactctggttactgttagctct

SEQ ID NO: 2422 - DNA, 348 bp, Homo sapiens
gaagttcaattattagaaagcggtggtggtctggttcaaccgggtggtagcctgcgcctgagctgcgcggcgagcggttttactttccgcaacttcggcatgggttgggttcgtcaagcgccgggtaaaggcctggaatgggttagctggatcatctcttccggcaccgaaacatattatgcggatagcgttaaaggtcgttttactattagccgtgataacagcaaaaataccctgtacctgcaaatgaatagcctgcgcgcggaagatactgctgtttactattgcgctaagagcctgggtcgtttcgattattggggtcaaggtactcaggttactgttagctct

SEQ ID NO: 2423 - DNA, 357 bp, Homo sapiens
gaggtgcagctgttggagtctgggggaggcttggtacagcctggggggtccctgcgtctctcctgtgcagcctccggattcacctttcgtaatttcgggatggggtgggtccgccaggctccagggaagggtctagagtgggtctcatggattgagggggggggtactgagacatactacgcagactccgtgaagggccggttcaccatctcccgcgacaattccaagaacacgctgtatctgcaaatgaacagcctgcgtgccgaggacaccgcggtatattactgtgcgcgcctacctaagagggggccttggtttgactaccggggtcagggaaccctggtcaccgtctcgagc

SEQ ID NO: 2424 - DNA, 348 bp, Homo sapiens
gaagttcaattattagaaagcggtggtggtctggttcaaccgggtggtagcctgcgcctgagctgcgcggcgagcggttttactttccgcaacttcggcatgggttgggttcgtcaagcgccgggtaaaccgctggaatgggttagctggatcatctcttccggcaccgaaacatattatgcggatagcgttaaaggtcgttttactattagccgtgataacagcaaaaataccctgtacctgcaaatgaatagcctgcgcgcggaagatactgctgtttactattgcgctaagagcctgggtcgtttcgattattggggtcaaggtactctggttactgttagctct

SEQ ID NO: 2425 - DNA, 348 bp, Homo sapiens
gaagttcaattattagaaagcggtggtggtctggttcaaccgggtggtagcctgcgcctgagctgcgcggcgagcggttttactttccgcaacttcggcatgggttgggttcgtcaagcgccgggtaaaggcctggaatgggttagctggatcatctcttccggcaccgaaacatattatgcggatagcgttaaaggtcgttttactattagccgtgataacagcaaaaataccctgtacctgcaaatgaatagcctgcgcgcggaagatactgctgtttactattgcgctaagagcctgggtcgtttcgattatttcggtcaaggtactctggttactgttagctct

SEQ ID NO: 2426 - protein, 108 aa, Homo sapiens
DIQMTQSPSSLSASVGDRVTITCRASRHISDWLHWYQQKPGKAPKLLIPWASGLWSGVPSRFSGSGSGTDFTLTISSLQPEDFATYYCLQEGWGPPTFGQGTKVEIKR

SEQ ID NO: 2427 - protein, 108 aa, Homo sapiens
DIQMTQSPSSLSASVGDRVTITCRASRHIGDWLHWYQQKPGKAPKLLIAWASTLDSGVPSRFSGSGSGTDFTLTISSLQPEDFATYYCLQEGWGPPTFGQGTKVEIKR

SEQ ID NO: 2428 - protein, 116 aa, Homo sapiens
EVQLLDSGGGLVQPGGSLRLSCAASGFTFRNFGMGWVRQAPGKGLEWVSWIDASGTETYYADPVKGRFTISRDNSKNTLYLQMNSLRAEDTAVYYCAKSLGRFDYWGQGTLVTVPS

SEQ ID NO: 2429 - protein, 116 aa, Homo sapiens
EVQLLDSGGGLVQPGGSLRLSCAASGFTFRNFGMGWVRQAPGKGLEWVSWILGSGTETYYADPVKGRFTISRDNSRNTLYLQMNSLRAEDTAVYYCAKSLGRFDYWGQGTLVTVSS

SEQ ID NO: 2430 - protein, 116 aa, Homo sapiens
EVQLLDSGGGLVQPGGSLRLSCAASGFTFRNFGMGWVRQAPGKGLEWVSWIVGSGTETYYADPVKGRFTISRDNSKNTLYLQMNSLRAEDTAVYYCAKSLGRFDYWGQGTLVTVSS

SEQ ID NO: 2431 - protein, 116 aa, Homo sapiens
EVQLLDSGGGLVQPGGSLRLSCAASGFTFRNFGMGWVRQAPGKGLEWVSWIEGGGTETYYADPVKGRFTISRDNSKNTLYLQMNSLRAEDTAVYYCAKSLGRFDYWGQGTLVTVSS

SEQ ID NO: 2432 - protein, 116 aa, Homo sapiens
EVQLLDSGGGLVQPGGSLRLSCAASGFTFRNFGMGWVRQAPGKGLEWVSWIISSGTETYYADPVKGRFTISRDNSKNTLYLQMNSLRAEDTAVYYCAKSLGRFDYWGQGTLVTVSG

SEQ ID NO: 2433 - protein, 116 aa, Homo sapiens
EVQLLESGGGLVQPGGSLRLSCAASGFTFRNFGMGWVRQAPGKGLEWVSWILGSGTETYYADSVKGRFTISRDNSKNTLYLQMNSLRAEDTAVYYCAKSLGRFDYWGQGTLVTVSS

SEQ ID NO: 2434 - protein, 116 aa, Homo sapiens
EVQLLESGGGLVQPGGSLRLSCAASGFTFRNFGMGWVRQAPGKGLEWVSWIISSGTETYYADSVKGRFTISRDNSKNTLYLQMNSLRAEDTAVYYCAKSLGRFDYWGQGTLVTVSS

SEQ ID NO: 2435 - protein, 116 aa, Homo sapiens
EVQLLESGGGLVQPGGSLRLSCAASGFTFRNYGMAWVRQAPGKGLEWVSWIEGGGTETYYADPVKGRFTISRDNSKNTLYLQMNSLRAEDTAVYYCAKSLGRFDYWGQGTLVTVSS

SEQ ID NO: 2436 - protein, 116 aa, Homo sapiens
EVQLLESGGGLVQPGGSLRLSCAASGFTFRNFGMGWVRQAPGKGLEWVSWIDASGTETYYADPVKGRFTISRDNSKNTLYLQMNSLRAEDTAVYYCAKSLGRFDYWGQGTLVTVSS

SEQ ID NO: 2437 - protein, 116 aa, Homo sapiens
EVQLLESGGGLVQPGGSLRLSCAASGFTFRNFGMGWVRQAPGKGLEWVSWILGSGTEEYYADSVKGRFTISRDNSKNTLYLQMNSLRAEDTAVYYCAKSLGRFDYWGQGTLVTVSS

SEQ ID NO: 2438 - protein, 116 aa, Homo sapiens
EVQLLESGGGLVQPGGSLRLSCAASGFTFRNFGMGWVRQAPGKGLEWVSWILGSGTEEYYADSVKGRFTISRDNSRNTLYLQMNSLRAEDTAVYYCAKSLGRFDYWGQGTLVTVSS

SEQ ID NO: 2439 - protein, 116 aa, Homo sapiens
EVQLLESGGGLVQPGGSLRLSCAASGFTFRNFGMGWVRQAPGKGLEWVSWIVGSGTEEYYADSVKGRFTISRDNSKNTLYLQMNSLRAEDTAVYYCAKSLGRFDYWGQGTLVTVSS

SEQ ID NO: 2440 - protein, 116 aa, Homo sapiens
EVQLLESGGGLVQPGGSLRLSCAASGFTFRNFGMGWVRQAPGKGLEWVSWIEGGGTEEYYADSVKGRFTISRDNSKNTLYLQMNSLRAEDTAVYYCAKSLGRFDYWGQGTLVTVSS

SEQ ID NO: 2441 - protein, 116 aa, Homo sapiens
EVQLLESGGGLVQPGGSLRLSCAASGFTFRNFGMGWVRQAPGKGLEWVSWIISSGTEEYYADSVKGRFTISRDNSKNTLYLQMNSLRAEDTAVYYCAKSLGRFDYWGQGTLVTVSS

SEQ ID NO: 2442 - protein, 116 aa, Homo sapiens
EVQLLESGGGLVQPGGSLRLSCAASGFTFRNFGMGWVRQAPGKGLEWVSWIEGGGTETYYADSVKGRFTISRDNSKNTLYLQMASLRAEDTAVYYCAKSLGRFDYWGQGTLVTVSS

SEQ ID NO: 2443 - protein, 116 aa, Homo sapiens
EVQLLESGGGLVQPGGSLRLSCAASGFTFRNFGMGWVRQAPGKGLEWVSWILGSGTETYYADSVKGRFTISRDNSKNTLYLQMASLRAEDTAVYYCAKSLGRFDYWGQGTLVTVSS

SEQ ID NO: 2444 - protein, 116 aa, Homo sapiens
EVQLLESGGGLVQPGGSLRLSCAASGFTFRNFGMGWVRQAPGKGLEWVSWIISSGTETYYADSVKGRFTISRDNSKNTLYLQMASLRAEDTAVYYCAKSLGRFDYWGQGTLVTVSS

SEQ ID NO: 2445 - protein, 116 aa, Homo sapiens
EVQLLESGGGLVQPGGSLRLSCAASGFTFRNFGMGWVRQAPGKGLEWVSWIISSGTETYYADSVKGRFTISRDNSKNTLYLQMNSLRAEDTAVYYCAKSYGAFDYWGQGTLVTVSS

SEQ ID NO: 2446 - protein, 116 aa, Homo sapiens
EVQLLESGGGLVQPGGSLRLSCAASGFTFRNFGMGWVRQAPGKGLEWVSWIISSGTETYYADSVKGRFTISRDNSKNTLYLQMNSLRDEDTAVYYCAKSLGRFDYWGQGTLVTVSS

SEQ ID NO: 2447 - protein, 116 aa, Homo sapiens
EVQLVESGGGLVQPGGSLRLSCAASGFTFRNFGMGWVRQAPGKGLEWVSWIISSGTETYYADSVKGRFTISRDNSKNTLYLQMTSLRAEDTAVYYCAKSLGRFDYWGQGTLVTVSS

SEQ ID NO: 2448 - protein, 116 aa, Homo sapiens
EVQLLESGGGLVQPGGSLRLSCAASGFTFRNFGMGWARQAPGKGLEWVSWIISSGTETYYADSVKGRFTISRDNSKNTLYLQMNSLRAEDTAVYYCAKSLGRFDYWGQGTLVTVSS

SEQ ID NO: 2449 - protein, 116 aa, Homo sapiens
EVQLLESGGGLVQPGGSLRLSCAASGFTFRNFGMGWARQAPGKPLEWVSWIISSGTETYYADSVKGRFTISRDNSKNTLYLQMNSLRAEDTAVYYCAKSLGRFDYWGQGTLVTVSS

SEQ ID NO: 2450 - protein, 116 aa, Homo sapiens
EVQLLESGGGLVQPGGSLRLSCAASGFTFRNFGMGWVRQAPGKELEWVSWIISSGTETYYADSVKGRFTISRDNSKNTLYLQMNSLRAEDTAVYYCAKSLGRFDYWGQGTLVTVSS

SEQ ID NO: 2451 - protein, 116 aa, Homo sapiens
EVQLLESGGGLVQPGGSLRLSCAASGFTFRNFGMGWVRQAPGKGLELVSWIISSGTETYYADSVKGRFTISRDNSKNTLYLQMNSLRAEDTAVYYCAKSLGRFDYWGQGTLVTVSS

SEQ ID NO: 2452 - protein, 116 aa, Homo sapiens
EVQLLESGGGLVQPGGSLRLSCAASGFTFRNFGMGWARQAPGKGLEWVSWIISSGTETYYADSVKGRFTISRDNSKNTLYLQMNSLRAEDTAVYYCAKSLGRFDYFGQGTLVTVSS

SEQ ID NO: 2453 - protein, 116 aa, Homo sapiens
EVQLLESGGGLVQPGGSLRLSCAASGFTFRNFGMGWVRQAPGKGLEWVSWIISSGTETYYADSVKGRFTISRDNSKNTLYLQMNSLRAEDTAVYYCAKSLGRFDYYGQGTLVTVSS

SEQ ID NO: 2454 - protein, 116 aa, Homo sapiens
EVQLLESGGGLVQPGGSLRLSCAASGFTFRNFGMGWVRQAPGKGLEWVSWIISSGTETYYADSVKGRFTISRDNSKNTLYLQMNSLRAEDTAVYYCAKSLGRFDYGGQGTLVTVSS

SEQ ID NO: 2455 - protein, 116 aa, Homo sapiens
EVQLLESGGGLVQPGGSLRLSCAASGFTFRNFGMGWVRQAPGKGLEWVSWIISSGTETYYADSVKGRFTISRDNSKNTLYLQMNSLRAEDTAVYYCAKSLGRFDYWGQGTQVTVSS

SEQ ID NO: 2456 - protein, 116 aa, Homo sapiens
EVQLLESGGGLVQPGGSLRLSCVASGFTFDVAEMDWVRQAPGKGLEWVSTISPSRRGTYYADSVKGRFTISRDNSKNTLYLQMNSLRAEDTAVYYCAKAYTGRSLWGPGTLVTVSS

SEQ ID NO: 2457 - protein, 116 aa, Homo sapiens
EVQLLESGGGLVQPGGSLRLSCAASGFTFDVAEMDWVRQAPGKGLEWVSTISPSRRGTYYADSVKGRFTISRDNSKNTLYLQMNSLRAEDTAVYYCAKAYTGRSWWGPGTLVTVSS

SEQ ID NO: 2458 - protein, 116 aa, Homo sapiens
EVHLLESGGGLVQPGGSLRLSCAASGFTFDSAEMDWVRQAPGKGLEWVSTISPSRRGTYYADSVKGRFTISRDNSKNTLYLQMNSLRAEDTAIYYCAKAYTGRSYWGPGTLVTVSS

SEQ ID NO: 2459 - protein, 116 aa, Homo sapiens
GVQLLESGGGLVQPGGSLRLSCAASGFTFDSAEMDWVRQAPGKGLEWVSTISPSRRGTYYADSVKGRFTISRDNSKNTLYLQMNSLRAEDTAVYYCAKAYTGRSYWGPGTLVTVSS

SEQ ID NO: 2460 - protein, 116 aa, Homo sapiens
GVQLLESGGGLVQPGGSLRLSCVASGFTFDVAEMDWVRQAPGKGLEWVSTISPSRRGTYYADSVKGRFTISRDNSKNTLYLQMNSLRAEDTAVYYCAKAYTGRSLWGPGTLVTVSS

SEQ ID NO: 2461 - protein, 108 aa, Homo sapiens
DIQMTQSPSSLSASVGDRVTITCRASQSIIKHLKWYQQKPGKAPKLLIYGASRLQSGVPSRFSGSGSGTDFTLTISSLQPEDFATYYCQQGARWPQTFGQGTKVEIKR

SEQ ID NO: 2462 - protein, 108 aa, Homo sapiens
DIQMTQSPSSLSASVGDRVTITCRASQSIFRHLKWYQQKPGKAPKLLIYAASRLQSGVPSRFSGSGSGTDFTLTISSLQPEDFATYYCQQVALYPKTFGQGTKVEIKR

SEQ ID NO: 2463 - protein, 108 aa, Homo sapiens
DIQMTQSPSSLSASVGDRVTITCRASQSIYYHLKWYQQKPGKAPKLLIYKASTLQSGVPSRFSGSGSGTDFTLTISSLQPEDFATYYCQQVRKVPRTFGQGTKVEIKR

SEQ ID NO: 2464 - DNA, 348 bp, Homo sapiens
gaggtgcagctgttggagtctgggggaggcttggtacagcctggggggtccctgcgtctctcctgtgtagcctccggattcacctttgatgtggccgagatggattgggtccgccaggctccagggaagggtctagagtgggtctcaactatttcgccgtcgaggagggggacatactacgcagactccgtgaagggccggttcaccatctcccgcgacaattccaagaacacgctgtatctgcaaatgaacagcctgcgtgccgaggacaccgccgtatattactgtgcgaaagcgtacacggggaggagcttgtggggtccgggaaccctggtcaccgtctcgagc

SEQ ID NO: 2465 - DNA, 348 bp, Homo sapiens
gaggtgcagctgttggagtctgggggaggcttggtacagcctggggggtccctgcgtctctcctgtgcagcctccggattcacctttgatgtggccgagatggattgggtccgccaggctccagggaagggtctagagtgggtctcaactatttcgccgtcgaggagggggacatactacgcagactccgtgaagggccggttcaccatctcccgcgacaattccaagaacacgctgtatctgcaaatgaacagcctgcgtgccgaggacaccgccgtatattactgtgcgaaagcgtatacggggaggagctggtggggtccgggaaccctggtcaccgtctcgagc

SEQ ID NO: 2466 - DNA, 348 bp, Homo sapiens
gaggtgcacctgttggagtctgggggaggcttggtacagcctggggggtccctgcgtctctcctgcgcagcctccggattcacctttgattccgccgagatggattgggtccgccaggctccagggaagggtctagagtgggtctcaactatttcgccgtcgaggagggggacatactacgcagactccgtgaagggccggttcaccatctcccgcgacaattccaagaacacgctgtatctgcaaatgaacagcctgcgtgccgaggacaccgccatatattactgtgcgaaagcctacaccgggaggagctactggggtccgggaaccctggtcaccgtctcgagc

SEQ ID NO: 2467 - DNA, 348 bp, Homo sapiens
ggggtgcagctgttggagtctgggggaggcttggtacagcctggggggtccctgcgtctctcctgcgcagcctccggattcacctttgattccgccgagatggattgggtccgccaggctccagggaagggtctagagtgggtctcaactatttcgccgtcgaggagagggacatactacgcagactccgtgaagggccggttcaccatctcccgcgacaattccaagaacacgctgtatctgcaaatgaacagcctgcgtgccgaggacaccgccgtatattactgtgcgaaagcctacaccgggaggagctactggggtccgggaaccctggtcaccgtctcgagc

SEQ ID NO: 2468 - DNA, 348 bp, Homo sapiens
ggggtgcagctgttggagtctgggggaggcttggtacagcctggggggtccctgcgtctctcctgtgtagcctccggattcacctttgatgtggccgagatggattgggtccgccaggctccagggaagggtctagagtgggtctcaactatttcgccgtcgaggagggggacatactacgcagactccgtgaagggccggttcaccatctcccgcgacaattccaagaacacgctgtatctgcaaatgaacagcctgcgtgccgaggacaccgccgtatattactgtgcgaaagcgtacacggggaggagcttgtggggtccgggaaccctggtcaccgtctcgagc

SEQ ID NO: 2469 - DNA, 360 bp, Homo sapiens
ggtgtacaactgctggaatctggtggtggtctggttcaaccgggtggttctctgcgtctgtcttgcgcagcgagcggcttcaccttcgcctggtacgatatgggctgggttcgtcaggctccgggcaaaggtctggagtgggtgtcttctatcgactggcatggcgaggttacctactatgcggactctgttaaaggtcgtttcaccatctcccgtgataacagcaaaaacaccctgtacctgcagatgaacagcctgcgcgctgaagacaccgcggtatactactgtgcgaccgctgaggatgaaccgggttacgactattggggccagggcactctggtcacggttagctcttaatga

SEQ ID NO: 2470 - DNA, 360 bp, Homo  sapiens
ggtgttcaattgttggaatccggtggtggattggttcaacctggtggttctttgagattgtcctgtgctgcttccggttttactttcgcttggtacgacatgggatgggtcagacaagctcctggaaagggattggaatgggtttcctccattgattggcacggtgaagttacttactacgctgactccgttaagggaagattcactatctccagagacaactccaagaacactttgtacttgcagatgaactccttgagagctgaggatactgctgtttactactgtgctacagctgaagatgaaccaggttacgactactggggacagggaactttggttactgtttcctcctagtag

SEQ ID NO: 2471 - DNA, 360 bp, Homo sapiens
ggtgttcaattgttggaatccggtggtggattggttcaacctggtggttctttgagattgtcctgtgctgcttccggttttactttcgcttggtacgacatgggatgggttagacaagctcctggaaagggattggagtgggtttcctccattgattggcacggtgaagttacttactacgctgactccgttaagggaagattcactatctccagagacaactccaagaacactttgtacttgcagatgaactccttgagagctgaggatactgctgtttactactgtgctactgctgaagatgaaccaggttacgactactggggacagggaactttggttactgtttcctcctagtag

SEQ ID NO: 2472 - DNA, 354 bp, Homo sapiens
gaggttcaactgctggagtctggtggtggtctggttcagcctggtggtagcctgcgtctgtcttgcgtggcgtccggcttcactttcgatgttgctgagatggactgggttcgtcaggcgcctggtaaaggtctggagtgggtgtctaccattagcccatctcgtcgtggtacgtattacgctgacagcgtaaaaggtcgttttaccatctcccgcgataactctaaaaacactctgtacctgcaaatgaattctctgcgtgctgaggacaccgcagtatactactgcgcaaaagcctacactggccgttccctgtggggcccgggtaccctggtgactgtaagctcttaatga

SEQ ID NO: 2473 - DNA, 347 bp, Artificial Sequence
  Consensus
ggkgtrcarctgytggartctggkggwggyytggtwcarcckggkggktcyctgcgtctstcytgygcagcswscggmttcaccttcgcytggtaygatatgggstgggtycgycaggctccrggsaarggtctrgagtgggtstcwwstatygaytggcatggygaggttacmtactaygcrgactcygtkaarggycgkttcaccatctcccgygayaaywscaaraacacsctgtayctgcaratgaacagcctgcgygcygargacaccgcggtataytactgtgcgacmgckgaggaygarccgggktaygactaytggggccagggmacyctggtcacsgt

SEQ ID NO: 2474 - DNA, 354 bp, Artificial Sequence
  Consensus
ggkgtkcarytgttggartcyggkggwggmttggtwcarcctggkggktcyytgmgwytstcctgtgcwgcytccggwttyacyttcgcttggtaygayatgggrtgggtcmgmcargctccwggraagggwytrgartgggtytcmwsyattgattggcayggtgargttacwtactacgcwgactccgtkaagggmmgrttcacyatctccmgmgacaaytccaagaacackytgtayytgcaratgaacwscytgmgwgcygaggayacygckgtwtaytactgtgckacagckgargaygarccrggktaygactactggggmcagggaacyytggtyacygtytcywsc

SEQ ID NO: 2475 - DNA, 354 bp, Artificial Sequence
  Consensus
ggkgtkcarytgttggartcyggkggwggmttggtwcarcctggkggktcyytgmgwytstcctgtgcwgcytccggwttyacyttcgcttggtaygayatgggrtgggtymgmcargctccwggraagggwytrgagtgggtytcmwsyattgattggcayggtgargttacwtactacgcwgactccgtkaagggmmgrttcacyatctccmgmgacaaytccaagaacackytgtayytgcaratgaacwscytgmgwgcygaggayacygckgtwtaytactgtgckacwgckgargaygarccrggktaygactactggggmcagggaacyytggtyacygtytcywsc

SEQ ID NO: 2476 - DNA, 342 bp, Artificial Sequence
  Consensus
gaggtkcarctgytggagtctggkggwggyytggtwcagcctggkggkwscctgcgtctstcytgygtrgcstccggmttcacyttygatgtkgcygagatggaytgggtycgycaggckccwggkaarggtctrgagtgggtstcwacyattwssccrtckmgkmgkggkacrtaytacgcwgacwscgtraarggycgkttyaccatctcccgcgayaaytcyaaraacackctgtayctgcaaatgaaywsyctgcgtgcygaggacaccgcmgtataytactgygcraaagcstacackggsmgkwscytgtggggyccgggwaccctggtsacygtm
